(19) United States
(12) Patent Application Publication
(10) Pub. No.: US 2020/0263254 A1
(43) Pub. Date: Aug. 20, 2020

(54) METHOD FOR DETERMINING THE RESPONSE OF A MALIGNANT DISEASE TO AN IMMUNOTHERAPY

(71) Applicant: Dimo Dietrich, Berlin (DE)

(72) Inventor: Dimo Dietrich, Berlin (DE)

(21) Appl. No.: 15/733,039

(22) PCT Filed: Nov. 4, 2018
(86) PCT No.: PCT/EP2018/080073

§ 371 Date: Apr. 24, 2020

(30) Foreign Application Priority Data
Nov. 5, 2017 (DE) 10 2017 125 780.2

(51) Int. Cl. C12Q 1/6886; A61K 39/395; A61P 35/00

(52) U.S. Cl. CPC C12Q 1/6886; A61K 39/3955; C12Q 2600/106; C12Q 2600/154; A61P 35/00

(57) ABSTRACT

A method is useful for predicting a response of a malignant disease to an immunotherapy which inhibits the PD-1 immune checkpoint signaling pathway. The method is characterized in that at least a part of an immunoregulatory gene selected from CTLA4, CD86, CD28, CD80 and/or ICOS of cells of the malignant disease and/or of immune cells interacting with cells of the malignant disease is subjected to a DNA methylation analysis, and the result is used to predict the response of the malignant disease to the immunotherapy.

### CROSS-REFERENCE TO RELATED APPLICATIONS

[0001] The present application is a National stage entry under § 371 of International Application No. PCT/EP2018/080073, filed on Nov. 4, 2018, and which claims the benefit of German Application No. 10 2017 125 780.2, filed on Nov. 5, 2017, the contents of each of which are hereby incorporated by reference in their entireties.

### REFERENCE TO A SEQUENCE LISTING

[0002] The present application is accompanied by an ASCII text file which has been submitted via EFS-Web as a computer readable form containing the sequence listing, titled “2020-04-17-PCTUS_Sequence-Listing_revised_ST25.txt”, created on Apr. 17, 2020, with the file size of 991,691 bytes, which is incorporated by reference in its entirety.

### BACKGROUND OF THE INVENTION

### Field of the Invention

[0003] The invention relates, inter alia, to predictive molecular diagnostic methods and predictive biomarkers and their uses in oncological medicine for predicting the response of a malignant disease to immunotherapy. Furthermore, the invention relates to a kit for carrying out the specified methods.

### Discussion of the Background

[0004] Personalized medicine is based on the development of therapies that are tailored to patients with specific diseases. Immunotherapeutic treatments with so-called immune checkpoint inhibitors represent a promising approach in oncology, because they can also show exceptional results in advanced tumor diseases. A problem is, however, that even patients with identical clinical symptoms can respond differently to the same therapy or the same therapeutic drug.

[0005] Predictive molecular diagnostics (“companion diagnostics” and “complementary diagnostics”) and predictive biomarkers (“companion biomarkers” and “complementary biomarkers”) can help predict how well a patient will respond to a particular treatment or drug. For example, it is known from DE 10 2016 005 947 B3 that a DNA methylation analysis of the PD-1 gene of cells of a malignant disease or of T lymphocytes interacting with cells of the malignant disease enables a prediction of whether the patient will respond to immunotherapy with pharmaceutical compounds that inhibit the PD-1 receptor or its ligand.

[0006] In order to further improve the benefit-risk ratio of such immunotherapies, it is necessary to support clinical decision making by more precise subtyping of patient groups. There is a need for additional or complementary predictive methods and biomarkers to guide patient selection more reliably in view of a wide range of emerging treatment options.

### SUMMARY OF THE INVENTION

[0007] Against this background, a first aspect of the present invention provides a method for predicting a response of a malignant disease to an immunotherapy designed to inhibit a PD-1 immune checkpoint signaling pathway. The method is characterized in that at least a part of an immunoregulatory gene selected from CTLA4, CD86, CD28, CD80 and/or ICOS of cells of said malignant disease and/or of immune cells interacting with cells of said malignant disease is subjected to DNA methylation analysis. Subsequently, based on the result of the DNA methylation analysis, i.e. based on the presence, absence and/or level of DNA methylation of said immunoregulatory gene, the response of the malignant disease to said immunotherapy is predicted.

[0008] The second aspect of the invention provides a method for selecting a patient suffering from a malignant disease for an immunotherapy designed to inhibit a PD-1 immune checkpoint signaling pathway. The method comprises the steps of A) providing cells of said malignant disease and/or immune cells interacting with cells of said malignant disease from the patient, B) performing a DNA methylation analysis of at least a part of an immunoregulatory gene selected from CTLA4, CD86, CD28, CD80 and/or ICOS from the cells of the malignant disease and/or from the immune cells interacting with the cells of the malignant disease from A), and C) selecting the patient for said immunotherapy on the basis of the presence, absence and/or level of DNA methylation of said immunoregulatory gene examined or determined in B).

[0009] The third aspect of the invention provides a use of DNA methylation analysis of at least a part of an immunoregulatory gene selected from CTLA4, CD86, CD28, CD80 and/or ICOS of cells of a malignant disease and/or of immune cells interacting with cells of the malignant disease for predicting a response of the malignant disease to an immunotherapy, for the individualized selection of an immunotherapy for the malignant disease and/or for selecting a patient suffering from the malignant disease for an immunotherapy, wherein the immunotherapy is designed to inhibit a PD-1 immune checkpoint signaling pathway.

[0010] The fourth aspect of the invention provides a use of the presence, absence or level of DNA methylation of at least a part of an immunoregulatory gene selected from CTLA4, CD86, CD28, CD80 and/or ICOS of cells of a malignant disease and/or of immune cells interacting with cells of the malignant disease as a biomarker for predicting a response of said malignant disease to immunotherapy, for the individualized selection of an immunotherapy for said malignant disease and/or for selecting a patient suffering from said malignant disease for an immunotherapy, wherein said immunotherapy is designed to inhibit a PD-1 immune checkpoint signaling pathway.

[0011] According to a fifth aspect, the invention provides a kit for carrying out one of the aforementioned methods or for one of the aforementioned uses. The kit comprises reagents for DNA methylation analysis of at least part of an immunoregulatory gene selected from CTLA4, CD86, CD28, CD80 and/or ICOS of cells of a malignant disease and/or of immune cells interacting with cells of the malignant disease in order to determine the presence, absence and/or level of DNA methylation of said immunoregulatory gene.

### Definitions and General Explanations

[0012] In this description, various documents are cited to provide a general technical background with respect to the present invention. The disclosure and teaching of these documents are hereby incorporated by reference in its entirety to supplement the following description in order to avoid repetition.

[0013] The following definitions and general explanations are intended to guide and assist the skilled reader in understanding, interpreting and practicing the present invention. Unless otherwise stated, all technical and scientific terms shall have the meaning which corresponds to the usual understanding of a person of ordinary skill in the art in the field of the present invention.

[0014] The different aspects and variants of the present invention involve techniques and methods that are routine practice in molecular biology. In particular, DNA methylation analysis for determination of the methylation of a CpG dinucleotide is part of the technical knowledge of a molecular biologist or geneticist. Useful laboratory manuals for these techniques and methods are readily available to the skilled person, such as “Molecular Cloning. A Laboratory Manual” by M. R. Green and J. Sambrook, 4th Ed., 2012, Cold Spring Harbor Laboratory Press.

[0015] As they are used herein, indefinite articles such as “a” or “one” include the possibility that two or more of these features may also be present.

[0016] As used herein, the term “malignant disease” or “malignant diseases” includes such clinical conditions that are characterized by a course of disease that is progressively destructive and may eventually lead to the death of the patient. Malignant diseases comprise malignant tissue formations, for example neoplasias or tumors, wherein the malignancy can be characterized by uncontrolled, space-consuming, displacing, infiltrative and/or invasive growth. Malignant tumors are generally capable of forming metastases. Malignant tumors include carcinomas, sarcomas, melanomas, glioblastomas, blastomas, seminomas and teratomas. Malignant diseases also include hematological malignant diseases, i. e. malignant diseases that affect the blood or hematopoietic system, such as leukemias, lymphomas, myeloproliferative diseases and myelodysplastic syndromes. Leukemias comprise a group of malignant diseases in which immature hematopoietic cells have undergone malignant changes, proliferate excessively and lead to an accumulation of cells in the peripheral blood. Lymphomas comprise diseases in which cells of the lymphatic system are degenerated. Myeloproliferative diseases comprise a group of diseases in which one or more hematopoietic cell lines are highly proliferated. Myelodysplastic syndromes comprise a clonal expansion of precursor cells of all hematopoietic cell lines, based on a chronic differentiation disorder of the hematopoietic stem cells.

[0017] “Immunotherapy” or “immunotherapeutic treatment” is used herein as a collective term for all methods of treatment aimed at influencing the activity of the immune system. Immunotherapy can be directed at strengthening or weakening the effect of the immune system. In certain variants of the invention, an immunotherapy comprises treatment with pharmaceutical compounds to strengthen the organism's own immune response against the malignant disease. Such pharmaceutical compounds include immune checkpoint inhibitors such as monoclonal antibodies which specifically bind to immune checkpoints and thus prevent their (in particular anti-inflammatory) signaling. Another possibility are compounds that inhibit the expression of immune checkpoints, for example by RNA interference.

[0018] The “response” to immunotherapy can be assessed according to the immune-related Response Evaluation Criteria In Solid Tumors-irRECIST (Nishino et al., J Immunother Cancer, 2014, 2:17, Wolchok et al., Clin Cancer Res. 2009, 15:7412-20). In particular, a response to immunotherapy may be characterized by complete or partial remission, by an unchanged (stable) state, and by a delay in one or more of the following events: death, recurrence, occurrence of lymph node metastases, occurrence of distant metastases, progression of the malignant disease. A response to immunotherapy may also be characterized by a delayed increase or decrease in another parameter specific to the malignant disease. For example, a decrease or delayed increase in blood levels of prostate-specific antigen (PSA) may indicate a prostate cancer response to immunotherapy. Failure to respond may be characterized by an increasing or accelerated increase in the extent of the malignant disease. The degree of the malignant disease before the beginning of the therapy can serve as a comparative measure. The extent of the disease can be characterized by the number of malignant cells, the number of metastases or the size of the malignant tumor.

[0019] As used herein, “inhibiting a PD-1 immune checkpoint pathway” or “inhibiting a CTLA4 immune checkpoint pathway” means to slow down, inhibit or prevent one or more reactions of a chemical, biological and/or physical nature mediated by an interaction of the PD-1 immune checkpoint with its ligand PD-L1 and/or PD-L2, or of the CTLA4 immune checkpoint with its ligand CD86 and/or CD80, respectively.

[0020] “DNA methylation” is considered to be the biochemical or chemical coupling of methyl groups to specific nucleotides of DNA. In the context of the present invention, “DNA methylation” refers to the presence of a methyl group on the fifth carbon atom of a cytosine (5-methylcytosine) located in a CpG dinucleotide context. A “CpG dinucleotide” is a DNA motif which has the nucleoside sequence cytidine-phosphate-guanosine in the generally recognized reading direction from 5′ to 3′. Guanosine consists of the nucleobase guanine and the sugar β-D-ribose. Cytidine consists of the nucleobase cytosine and the sugar β-D-ribose.

[0021] A “DNA methylation analysis” in the sense of the present invention therefore comprises the determination of such DNA methylation of one or more CpG dinucleotides from a specific sequence context. In various variants of the present invention, “DNA methylation analysis” shall be understood as the determination of whether the cytosine is present in said CpG dinucleotide(s) in methylated form. If a large number of genome copies are examined, DNA methylation analysis can also be used to determine the level of DNA methylation. For this purpose, e. g. an average presence of the methylated form of cytosine in the CpG dinucleotide(s) contained in the large number of genome copies is determined, hereinafter also referred to as “degree of methylation”.

[0022] “Co-methylation” means a correlation of DNA methylation between two or more CpG dinucleotides. Such correlating methylations regularly occur in CpG dinucleotides that are adjacent in the genome and/or that are located within adjacent, structurally and/or functionally related genes that can be expressed together. DNA methylation of one gene can therefore be used to draw conclusions about DNA methylation of the other, co-methylated gene.

[0023] A “gene” in the sense of the present invention is a section of DNA which comprises regulatory, transcribed and/or functional sequence regions and thus contains the basic information for the production of a biologically active RNA. In particular, a gene can also comprise those elements, such as promoter, transcription factor binding sites, CpG islands, open chromatin, enhancer and silencer. CTCF binding sites, which fulfil a regulatory function in the transcription of the gene.

[0024] The nomenclature for the designation of genes and their nucleotides is based on the recommendation of the “Human Genome Organisation Gene Nomenclature Committee” (HGNC) as of 31 Oct. 2017; for example, a gene stem is designated by italic Latin capital letters (e.g. (CTLA4, CD86). The genes described herein are publicly available via the “GenBank” of the National Institute of Health, USA, as of 31 Oct. 2017 (Benson D. A. et al., Nucleic Acids Research, 2013, 41. D36-42).

[0025] When reference is made in the following description to specific DNA sequences (SEQ ID NOs), this shall always include sequence variants with at least 95%, at least 96%, at least 97%, at least 98% or at least 99% sequence identity with the said DNA sequence. The sequence identity of two nucleic acid sequences can be determined, for example, with the ClustalW algorithm (Thompson et al., Nucleic Acids Research, 1994, 22, 4673-4680).

[0026] For the purposes of the present invention, “immune cells interacting with cells of the malignant disease” comprises those immune cells which are in specific contact or can be in specific contact with cells of the malignant disease, for example, via a ligand-receptor bond. The ligand can be located on the surface of malignant disease cells, for example an MHC peptide complex, an MHC 1 antigen complex or an epitope. The receptor can be located on the surface of the immune cells, for example a T-cell receptor or B-cell receptor. Alternatively, the ligand can be located on the surface of the immune cells and the receptor can be located on the surface of the cells of the malignant disease. “Immune cells interacting with the cells of the malignant disease” therefore also includes, for example. T lymphocytes and/or B lymphocytes which, through contact with an antigen or antigen-presenting cells, have been enabled (activated) to interact specifically with cells of the malignant disease via one of the aforementioned ligand-receptor bonds without themselves having previously come into contact with the corresponding cells of the malignant disease. An antigen-presenting cell can be a dendritic cell, a macrophage or a B lymphocyte, for example. Activation occurs, for example, via ligand-receptor binding between T lymphocytes and an antigen-presenting cell, which presents an antigen derived from a cell of the malignant disease. The ligand, for example an MHC II antigen complex, is located on the surface of the antigen-presenting cells and the T-cell receptor is located on the surface of the T lymphocyte. Another form of interaction between T lymphocytes and cells of the malignant disease in the sense of the present invention involves adenosine produced by the cells of the malignant disease being bound by a receptor on the surface of the T lymphocytes. It is also possible that the adenosine is produced by T lymphocytes and the receptor is located on the surface of cells of the malignant disease. In the sense of the present invention. “immune cells interacting with cells of the malignant disease” further includes such immune cells, in particular T lymphocytes and/or B lymphocytes, which interact with the cells of the malignant disease via growth factors and/or cytokines.

[0027] “Biomarkers” are characteristic indicators and/or biological features that can be objectively measured and that allow conclusions to be drawn about the status of a normal biological process or a pathological process in an organism, or the response of a normal or pathological process to an intervention, such as surgery, radiation or pharmaceutical treatment. Biomarkers are often (bio)chemical substances such as proteins, hormones, metabolites, sugars and nucleic acids, as well as modifications thereof.

[0028] Both the above general description and the following detailed description should be understood as examples and are intended to explain the claimed invention. Further advantages and features of the invention are apparent from the following description, drawings and claims. While the invention is described on the basis of preferred embodiments, many further variations can be made without departing from the scope of the present invention. Therefore, it is intended that the claims cover variations and combinations of features that are included in the actual scope of the invention, even if they are not expressly mentioned in the claims.

### BRIEF DESCRIPTION OF FIGURES

[0029] FIG. 1 shows a box plot of the distribution of CTLA4 DNA methylation in malignant melanomas of patients with progressive disease, stable disease, partial and complete remission during immunotherapy designed to inhibit the PD-1 immune checkpoint signaling pathway. DNA methylation was determined before starting immunotherapy. Patients were grouped retrospectively according to irRECIST criteria.

[0030] FIG. 2 shows a Kaplan-Meier analysis of the overall survival of 50 patients with malignant melanomas during immunotherapy designed to inhibit the PD-1 immune checkpoint signaling pathway. The patients were grouped in a three-level classification based on CTLA4 DNA methylation. The lower tertile comprises the 17 patients with the lowest measured DNA methylation, the upper tertile comprises the 17 patients with the highest measured DNA methylation and the middle tertile comprises the remaining 16 patients.

[0031] FIG. 3 shows a co-methylation matrix of different gene loci of CTLA4. CD28. CD80. CD86 and ICOS in 419 urothelial carcinomas of the bladder.

[0032] FIG. 4 shows a co-methylation matrix of different gene loci of CTLA4, CD28, CD80, CD86 and ICOS in 797 breast cancer tumors.

[0033] FIG. 5 shows a co-methylation matrix of different gene loci of CTLA4, CD28, CD80. CD86 and ICOS in 530 squamous cell carcinomas of the head and neck.

[0034] FIG. 6 shows a co-methylation matrix of different gene loci of CTLA4, CD28, CD80, CD86 and ICOS in 325 clear cell renal cell carcinomas.

[0035] FIG. 7 shows a co-methylation matrix of different gene loci of CTLA4, CD28, CD80, CD86 and ICOS in 475 adenocarcinomas of the lung.

[0036] FIG. 8 shows a co-methylation matrix of different gene loci of CTLA4, CD28, CD80, CD86 and ICOS in 370 squamous cell carcinomas of the lung.

[0037] FIG. 9 shows a co-methylation matrix of different gene loci of CTLA4, CD28, CD80, CD86 and ICOS in 265 sarcomas.

[0038] FIG. 10 shows a co-methylation matrix of different gene loci of CTLA4, CD28, CD80, CD86 and ICOS in 473 cutaneous melanomas.

### BRIEF DESCRIPTION OF THE SEQUENCES

[0039] SEQ ID NO:1: CD28, CTLA4, ICOS gene locus 2:203551590-204126647; SEQ ID NO:2: CD80 gene locus 3:119523584-119573836; SEQ ID NO:3: CD86 gene locus 3:122039741-122154807; SEQ ID NO:4: ACTB qPCR reverse primer; SEQ ID NO:5: ACTB qPCR forward primer; SEQ ID NO:6: ACTB qPCR detection probe; SEQ ID NO:7: ACTB qPCR amplicon; SEQ ID NO:8: genomic sequence of ACTB qPCR amplicon; SEQ ID NO:9: CTLA4 qPCR forward primer; SEQ ID NO: 10: CTLA4 qPCR reverse primer: SEQ ID NO: 11: CTLA4 qPCR detection probe; SEQ ID NO:12: CTLA4 qPCR amplicon (methylated); SEQ ID NO: 13: genomic sequence of CTLA4 qPCR amplicon; SEQ ID NO: 14: CTLA4 gene locus 2:203867786-203873960; SEQ ID NO: 15: CTLA4 promoter 2:203861999-203868480; SEQ ID NO: 16: target sequence of probe cg15765889 from the Infinium HumanMethylation450 BeadChip; SEQ ID NO: 17: target sequence of probe cg14308944 from the Infinium HumanMethylation450 BeadChip: SEQ ID NO: 18: target sequence of probe cg11028872 from the Infinium HumanMethylation450 BeadChip; SEQ ID NO: 19: target sequence of probe cg15022671 from the Infinium HumanMethylation450 BeadChip; SEQ ID NO:20: target sequence of probe cg21078108 from the Infinium HumanMethylation450 BeadChip: SEQ ID NO:21: target sequence of probe cg27614178 from the Infinium HumanMethylation450 BeadChip; SEQ ID NO:22: target sequence of probe cg10240150 from the Infinium HumanMethylation450 BeadChip: SEQ ID NO:23: target sequence of probe cg13651908 from the Infinium HumanMethylation450 BeadChip; SEQ ID NO:24: target sequence of probe cg13790288 from the Infinium HumanMethylation450 BeadChip; SEQ ID NO: 25: target sequence of probe cg21911000 from the Infinium HumanMethylation450 BeadChip: SEQ ID NO:26: target sequence of probe cg22309950 from the Infinium HumanMethylation450 BeadChip; SEQ ID NO:27: target sequence of probe cg01206398 from the Infinium HumanMethylation450 BeadChip; SEQ ID NO:28: target sequence of probe cg09345839 from the Infinium HumanMethylation450 BeadChip; SEQ ID NO:29: target sequence of probe cg12005412 from the Infinium HumanMethylation450 BeadChip: SEQ ID NO:30: target sequence of probe cg05074138 from the Infinium HumanMethylation450 BeadChip; SEQ ID NO:31: target sequence of probe cg14288266 from the Infinium HumanMethylation450 BeadChip; SEQ ID NO:32: target sequence of probe cg05092371 from the Infinium HumanMethylation450 BeadChip; SEQ ID NO:33: target sequence of probe cg24077172 from the Infinium HumanMethylation450 BeadChip; SEQ ID NO:34: target sequence of probe cg00372692 from the Infinium HumanMethylation450 BeadChip; SEQ ID NO:35: target sequence of probe cg15247069 from the Infinium HumanMethylation450 BeadChip; SEQ ID NO:36: target sequence of probe cg18561976 from the Infinium HumanMethylation450 BeadChip: SEQ ID NO:37: target sequence of probe cg110114877 from the Infinium HumanMethylation450 BeadChip; SEQ ID NO:38: target sequence of probe cg13756014 from the Infinium HumanMethylation450 BeadChip: SEQ ID NO:39: target sequence of probe cg08185695 from the Infinium HumanMethylation450 BeadChip; SEQ ID NO:40: target sequence of probe cg26836175 from the Infinium HumanMethylation450 BeadChip; SEQ ID NO:41: target sequence of probe cg20149531 from the Infinium HumanMethylation450 BeadChip: SEQ ID NO:42: target sequence of probe cg25683810 from the Infinium HumanMethylation450 BeadChip; SEQ ID NO:43: target sequence of probe cg09861034 from the Infinium HumanMethylation450 BeadChip: SEQ ID NO:44: target sequence of probe cg04098585 from the Infinium HumanMethylation450 BeadChip; SEQ ID NO:45: target sequence of probe cg07930752 from the Infinium HumanMethylation450 BeadChip; SEQ ID NO:46: target sequence of probe cg24336674 from the Infinium HumanMethylation450 BeadChip: SEQ ID NO:47: target sequence of probe cg02099418 from the Infinium HumanMethylation450 BeadChip; SEQ ID NO:48: target sequence of probe cg23012700 from the Infinium HumanMethylation450 BeadChip: SEQ ID NO:49: target sequence of probe cg26091609 from the Infinium HumanMethylation450 BeadChip; SEQ ID NO:50: target sequence of probe cg22572158 from the Infinium HumanMethylation450 BeadChip; SEQ ID NO:51: target sequence of probe cg08460026 from the Infinium HumanMethylation450 BeadChip: SEQ ID NO:52: target sequence of probe cg18914852 from the Infinium HumanMethylation450 BeadChip; SEQ ID NO:53: target sequence of probe cg18219180 from the Infinium HumanMethylation450 BeadChip; SEQ ID NO:54: target sequence of probe cg21423458 from the Infinium HumanMethylation450 BeadChip; SEQ ID NO:55: target sequence of probe cg17751550 from the Infinium HumanMethylation450 BeadChip: SEQ ID NO:56: target sequence of probe cg15344028 from the Infinium HumanMethylation450 BeadChip; SEQ ID NO:57: target sequence of probe cg21139795 from the Infinium HumanMethylation450 BeadChip; SEQ ID NO:58: target sequence of probe cg12978275 from the Infinium HumanMethylation450 BeadChip: SEQ ID NO:59: target sequence of probe cg02470871 from the Infinium HumanMethylation450 BeadChip; SEQ ID NO:60: target sequence of probe cg21572897 from the Infinium HumanMethylation450 BeadChip: SEQ ID NO:61: target sequence of probe cg06045968 from the Infinium HumanMethylation450 BeadChip; SEQ ID NO:62: target sequence of probe cg13458803 from the Infinium HumanMethylation450 BeadChip; SEQ ID NO:63: target sequence of probe cg06300880 from the Infinium HumanMethylation450 BeadChip; SEQ ID NO:64: target sequence of probe cg13913728 from the Infinium HumanMethylation450 BeadChip; SEQ ID NO:65: target sequence of probe cg11874272 from the Infinium HumanMethylation450 BeadChip; SEQ ID NO: 66: target sequence of probe cg04387658 from the Infinium HumanMethylation450 BeadChip; SEQ ID NO: 67: target sequence of probe cg01878435 from the Infinium HumanMethylation450 BeadChip; SEQ ID NO:68: target sequence of probe cg12323361 from the Infinium HumanMethylation450 BeadChip; SEQ ID NO:69: target sequence of probe cg09644952 from the Infinium HumanMethylation450 BeadChip: SEQ ID NO:70: target sequence of probe cg00697440 from the Infinium HumanMethylation450 BeadChip; SEQ ID NO:71: target sequence of probe cg13069531 from the Infinium HumanMethylation450 BeadChip; SEQ ID NO:72: target sequence of probe cg06327732 from the Infinium HumanMethylation450 BeadChip: SEQ ID NO:73: target sequence of probe cg16331599 from the Infinium HumanMethylation450 BeadChip; SEQ ID NO:74: target sequence of probe cg13617155 from the Infinium HumanMethylation450 BeadChip; SEQ ID NO:75: target sequence of probe cg01436254 from the Infinium HumanMethylation450 BeadChip; SEQ ID NO:76: target sequence of probe cg09410271 from the Infinium HumanMethylation450 BeadChip: SEQ ID NO:77: target sequence of probe cg09838701 from the Infinium HumanMethylation450 BeadChip; to SEQ ID NO:78 CTLA4 qPCR amplicon, unmethylated.

### DETAILED DESCRIPTION OF THE INVENTION

[0040] Immune checkpoints are key targets for immunotherapies. A so-called immune checkpoint blockade (ICB) has proven to be particularly effective in the treatment of various malignant diseases. With the help of immune checkpoint inhibitors, the signaling pathways of immunosuppressive immune checkpoints are interrupted so that the body's own immune system can better recognize and fight the malignant cells. However, since immunotherapeutic drugs are usually only effective in certain patients and any effect is often only observed after several months, it is of the utmost importance for clinical practice to have indications in the forefront of a therapy of whether a patient will respond to a particular treatment.

[0041] In DE 10 2016 005 947 B3, the inventor of the present invention has already been able to show that in cells of malignant diseases or in T lymphocytes interacting with the cells of the malignant diseases, respectively, the DNA methylation of central immunoregulatory genes such as the PDCD1 gene coding for PD-1 is directly correlated with the expression of the immune checkpoints encoded by these genes. The inventor has also discovered that this correlation allows to predict a patient's response to immunotherapy by analyzing the DNA methylation of these immunoregulatory genes. For example, a response to a pharmaceutical compound that inhibits the PD-1 receptor is more likely if DNA methylation analysis of the corresponding PDCD-1 gene from cells of the malignant disease or from T lymphocytes interacting with cells of the malignant disease indicates that the PD-1 receptor is initially expressed by the cells.

[0042] In the course of intensive further research work and extensive clinical studies, the inventor has now been able to show that, surprisingly, DNA methylation of the immunoregulatory genes CTLA4, CD86, CD28, CD80 and ICOS also indicates with particularly high reliability whether a malignant disease responds to an immunotherapy that inhibits a PD-1 immune checkpoint signaling pathway. In this respect, reference is also made to the following examples. This new finding was not expectable from a skilled person's point of view, because these genes code for immune checkpoints that are not directly related to the PD-1 immune checkpoint signaling pathway. Therefore, the new findings of the inventor differ fundamentally from the disclosure and teaching of DE 10 2016 005 947 B3, which is limited to the discovery that a DNA methylation analysis of an immunoregulatory gene is suitable for predicting the response to an immunotherapy directed against the immune checkpoint that is encoded by the same immunoregulatory gene.

[0043] Against this background, a first aspect of the present invention is directed to a method for predicting a response of a malignant disease to an immunotherapy designed to inhibit a PD-1 immune checkpoint signaling pathway. In this method, at least a part of an immunoregulatory gene of cells of said malignant disease and/or of immune cells interacting with cells of said malignant disease is subjected to DNA methylation analysis in order to analyze said immunoregulatory gene for DNA methylation. The immunoregulatory gene is selected from the group consisting of CTLA4, CD86, CD28, CD80, ICOS or any combination thereof. On the basis of this DNA methylation analysis, the response of said malignant disease to said immunotherapy is then predicted based on presence, absence and/or level of DNA methylation of said immunoregulatory gene (prediction).

[0044] The present invention is particularly characterized by the fact that DNA methylation analysis of the immunoregulatory genes according to the invention is universally suitable for predicting the response behavior of a wide variety of malignant diseases or tumor entities. This discovery by the inventor is in line with the latest state of knowledge of the U.S. Food and Drug Administration, which recently approved for the first time an immunotherapy of cancer diseases based on a common genetic characteristic of the diseases instead of defining the approval on the basis of the diseased organ as was previously standard practice (Chang et al., Appl Immunohistochem Mol Morphol. 2017, Epub ahead of print). The malignant disease may in particular include melanoma, carcinoma, sarcoma, glioblastoma lymphoma and/or leukemia. The carcinoma may be an adenocarcinoma, a squamous cell carcinoma, a small cell carcinoma, a neuroendocrine carcinoma, a renal cell carcinoma, a urothelial carcinoma, a hepatocellular carcinoma, an anal carcinoma, a bronchial carcinoma, an endometrial carcinoma, a cholangiocellular carcinoma, a hepatocellular carcinoma, a testicular carcinoma, a colorectal carcinoma, a carcinoma of the head and neck region, a carcinoma of the esophagus, a stomach carcinoma, a breast carcinoma, a kidney carcinoma, an ovarian carcinoma, a pancreatic carcinoma, a prostate carcinoma, a thyroid carcinoma and/or a cervical carcinoma, for example. A sarcoma may for example be an angiosarcoma, a chondrosarcoma, a Ewing sarcoma, a fibrosarcoma, a Kaposi sarcoma, a liposarcoma, a leiomyosarcoma, a malignant fibrous histiocytoma, a neurogenic sarcoma, an osteosarcoma or a rhabdomyosarcoma. A leukemia can be, for example, acute myeloid leukemia (AML), acute lymphocytic leukemia (ALL), chronic lymphocytic leukemia (CLL), or chronic myeloid leukemia (CML). Lymphoma can be Hodgkin's lymphoma or non-Hodgkin's lymphoma. Non-Hodgkin's lymphoma can be B-cell lymphoma or T-cell lymphoma. In particular, the malignant disease is a malignant melanoma, which may be metastasized.

[0045] The immunotherapy preferably comprises a pharmaceutical compound which binds to PD-1, PD-L1 and/or PD-L2 and, through this binding, inhibits the PD-1 immune checkpoint signaling pathway, for example by inhibiting the native interaction between the PD-1 receptor and its ligands. In particular, the immunotherapy or the pharmaceutical compound may comprise an anti-PD-1 antibody, an anti-PD-L1 antibody and/or anti-PD-L2 antibody. It is preferably a monoclonal antibody. The pharmaceutical compound may be selected from nivolumab (BMS-936558, trade name: Opdivo, manufacturer: Bristol-Myers Squibb), pembrolizumab (MK-3475, SCH900475, trade name: Keytruda, manufacturer: Merck/MSD Sharp & Dohme), pidilizumab (CT-011, MDV9300; manufacturer: CureTech Ltd, licensed by Medivation), MGD013 (Macrogenics), AMP-224 (manufacturer: GlaxoSmithKline), MEDI0680 (AMP-514, manufacturer: MedImmune LLC), AUNP-12 (manufacturer: Aurigene Discovery Technologies Ltd.), BMS935559 (MDX-1105, manufacturer: Bristol-Myers Squibb), CA-170 and CA-237 (manufacturer: Curis Inc.), MPDL3280A (manufacturer: Roche), MEDI4736 (manufacturer: AstraZeneca), avelumab (MSB0010718C. manufacturer: Pfizer) and/or rHIgM12B7 (B7-DC cross-linking antibody rHIgM12B7, Mayo Clinic), TSR-042 (manufacturer: Tesaro), SHR-1210 (manufacturer: Jiangsu Hengrui Medicine Co., Ltd.), Sym021 (manufacturer: Symphogen A/S), REGN2810 (manufacturer: Regeneron), JNJ-63723283 (manufacturer: JoJanssen Research & Development, LLC), BGB-A317 (manufacturer: BeiGene). PDR001 (manufacturer: Novartis), JTX-4014 (manufacturer: Jounce Therapeutics), atezolizumab (MPDL3280A, manufacturer: Genentech/Roche), durvalumab (MED14736, MEDI-4736, manufacturer: Medimmune/AstraZeneca), LY3300054 (manufacturer: Lilly), KN035 (manufacturer: Suzhou Alphamab Co. Ltd.), CX-072 (Manufacturer: CytomX Therapeutics) and any combinations thereof.

[0046] The DNA methylation analysis can basically be performed with any of the common methods known to the skilled person from the pertinent literature. A suitable method includes, for example, the following steps: A) Providing DNA of the cells of said malignant disease or of the immune cells interacting with cells of said malignant disease; B) converting at least part of the cytosines contained in said DNA from A) into uracil or another base having a base pairing behavior and/or molecular weight distinguishable from cytosine: C) analyzing the DNA obtained from step B) for DNA methylation of said immunoregulatory gene.

[0047] The DNA from step A) which is to be analyzed may originate from different sources and may include, for example, cells of the malignant disease or infiltrating immune cells, in particular tumor-infiltrating T lymphocytes, from surgically obtained or biopsied tissue. The (immune) cells may also be obtained from swabs and from aspirates such as rinsing fluids, fine needle aspirates or sputum. The DNA can also be obtained from blood, blood serum and blood plasma, for example in the form of circulating cell-free DNA, exosomal DNA, or in the form of circulating cells of the malignant disease and/or peripheral immune cells from which the DNA is derived. The DNA may also be obtained from other bodily fluids such as lymphatic fluid, urine, pleural effusions or ascites, for example in the form of circulating cell-free DNA or in the form of circulating cells of the malignant disease or circulating immune cells from which the DNA is derived. The DNA can also be obtained from non-preserved (fresh) cells, tissues and body fluids, as well as from fixed cells, tissues and body fluids. The fixation of the (immune) cells, tissues and body fluids can be achieved by precipitating fixatives such as ethanol and other alcohols or by cross-linking fixatives such as formaldehyde. For example, formalin-fixed and paraffin-embedded tissue (FFPET) may be used. The DNA can also be obtained from any combination of these sources. It may also be DNA extracted from the above sources. It is also possible to enrich the DNA, for example by precipitation or extraction. This can be done, for example, with circulating cell-free DNA from the body fluids mentioned above. It is also possible to enrich the (immune) cells, for example by size filtration or via magnetic particles carrying antibodies on their surface, whose antigens are located on the surface of the (immune) cells to be enriched.

[0048] This can be useful, for example, for circulating cells of the malignant disease or circulating immune cells from the aforementioned body fluids. Other suitable sources for the DNA to be analyzed are homogenizates of fresh tissue and lysates of fixed tissue. In contrast to conventional prediction methods based on immunohistochemical methods or mRNA expression analysis, a particular advantage of the present invention is that DNA methylation provides particularly robust and accurate prediction results even in the case of conserved sample materials, minute amounts of cells or completely cell-free DNA samples.

[0049] In a preferred variant, the DNA therefore comprises circulating cell-free DNA, DNA from exosomes and/or DNA from circulating (immune) cells from a body fluid, so-called “liquid biopsies”. Liquid biopsies currently represent a central area of oncological research. Instead of analyzing the suspicious tissue itself, for example tumor tissue, liquid biopsies analyze a sample of body fluid, for example a blood sample or lymphatic fluid sample. This sample can be used to analyze different substances that originate from the tumor, because circulating cell-free genomic DNA, exosomal DNA, as well as circulating cells or circulating immune cells are released from the tumor into the bloodstream. They may also be immune cells that come from the thymus or a lymph node and are able to interact specifically with the cells of the malignant disease, but do not originate from the tumor itself. It is advantageous to use the method of the present invention for the analysis of liquid biopsies if the tumor or a metastasis cannot be biopsied or if a biopsy would be too dangerous for the patient in the late tumor stage. The present invention is characterized by the fact that the DNA methylation of immunoregulatory genes can be measured very reliably in bodily fluids, where conventional determination of expression of immunoregulatory genes using mRNA or immunohistochemistry is difficult or even impossible.

[0050] The conversion of the DNA in step B) can in principle be carried out using any of the methods known in the state of the art and suitable for this purpose. It is typically a chemical or enzymatic conversion, for example by contacting the DNA with bisulfite, for example sodium bisulfite or ammonium bisulfite.

[0051] If necessary, the DNA may be purified after the conversion in step B) and prior to analyzing the DNA methylation in step C). Suitable purification methods and protocols are known to the skilled person and may include DNA extraction, precipitation or polymer-mediated enrichment, for example. In this respect, reference is also made to the embodiments described above.

[0052] The DNA methylation analysis is used to determine the presence, absence or level of DNA methylation in the analyzed part of the immunoregulatory gene. The analyzed part thus contains at least one CpG dinucleotide which is analyzed for DNA methylation, preferably several CpG dinucleotides which are analyzed for DNA methylation. Presence of DNA methylation therefore means that at least one methylated CpG dinucleotide is detected in the analyzed part of the immunoregulatory gene. Absence of DNA methylation means that no methylation is detectable in any of the CpG dinucleotides contained in said part. Determining the level of DNA methylation of the immunoregulatory gene may comprise analyzing several CpG dinucleotides for DNA methylation which are contained in the analyzed part. The determination of the level of DNA methylation of the immunoregulatory gene may also comprise an analysis of the same CpG dinucleotide for DNA methylation in a plurality of gene copies of the immunoregulatory gene. Combinations of these variants are also possible.

[0053] The analysis of the DNA methylation of the immunoregulatory gene in step C) is not subject to any particular restrictions. Suitable methods can easily be determined by the skilled person on the basis of this disclosure. In this respect, reference is also made to the laboratory manuals mentioned hereinabove. In a preferred variant, a polymerase chain reaction (PCR) is initially carried out with oligonucleotides, so-called primers, which is designed to amplify a section of the DNA converted in step B), which comprises the part of the immunoregulatory gene or the at least one CpG dinucleotide to be analyzed. Subsequently, at least a part of the amplification product is sequenced, for example by a Sanger sequencing, pyrosequencing, mass spectrometric sequencing or a sequencing of the second or third generation, which are also referred to as “massive parallel sequencing”, “next generation sequencing” (NGS) or nanopore sequencing. It is also possible to carry out hybridization with methylation-specific oligonucleotides (probes) following the PCR, for example in the form of a DNA microarray. DNA methylation can also be determined by quantitative real-time PCR (qPCR), optionally followed by a melting curve analysis. In particular, quantitative real-time PCR can be performed with methylation-specific primers as described in WO 1997/046705 A1 and/or methylation-specific blocker oligonucleotides as described in WO 2002/072880 A2. In a preferred variant, methylation-specific detection probes are used.

[0054] In yet other preferred variants, a PCR can be omitted, for example in the case of “Whole Genome Shotgun Bisulfite Sequencing” (WGSBS) or direct nanopore sequencing. In WGSBS, the DNA is fragmented, followed by ligation of adapters to the DNA fragments. The adapters can subsequently be used for amplification and sequencing. It can also be possible to skip the fragmentation step in the WGSBS, since the DNA may already be fragmented, for example, due to conversion by bisulfite treatment. Protocols for performing a WGSBS are readily available for the skilled person (Johnson, M. D. et al., Curr. Protoc. Mol. Biol., 2012. 99, 21.23.1-21.23.28; Lister. R. et al., Nature, 2009, 462, 315-322, Berman, B. P. et al., Nat. Genet., 2011, 44, 40-46).

[0055] In another preferred variant, hybridization with specific oligonucleotides (probes) can take place prior to PCR amplification. In the case of binding, the oligonucleotides are ligated and subsequently amplified by PCR. Suitable methods and protocols, such as “multiplex ligation dependent probe amplification” (MLPA) are readily available for the skilled person without difficulties, for example in “PCR Mutation Detection Protocols” by B. D. M. Theophilus and R. Rapley, 2nd Edition, 2011, Springer.

[0056] In another preferred variant, the DNA methylation analysis is performed using the Infinium HumanMethylation450 BeadChip. Suitable protocols can be found, for example, in the chapter “Determination of DNA Methylation Levels Using Illumina HumanMethylation450 BeadChips” by M. A. Carless, which can be found in the book “Chromatin Protocols” by S. P. Chellappan, Volume 1288, 2015, of the book series “Methods in Molecular Biology”, Springer Science+Business Media New York. Further suitable protocols are described in the following examples.

[0057] The inventor found out that the response of the malignant disease to the immunotherapy is the more likely the lower the level of DNA methylation of the immunoregulatory gene.

[0058] Consequently, the response of the malignant disease to immunotherapy is particularly likely when the DNA methylation of the immunoregulatory gene is close to zero, in particular when DNA methylation is actually absent or at least virtually absent due to technical detection limits.

[0059] It is therefore advantageous if the DNA methylation analysis is carried out under conditions which allow a quantitative determination of the DNA methylation of the immunoregulatory gene. If, for example, the DNA methylation analysis comprises gene copies of the immunoregulatory gene of several cells of the malignant disease and/or of several of the immune cells interacting with the cells of the malignant disease, a proportion of said gene copies of the immunoregulatory gene which contain the DNA methylation can be determined. For this purpose, the number or amount of methylated gene copies of the immunoregulatory gene may be correlated with the total number or amount of gene copies of the immunoregulatory gene being analyzed. In this way, the response of the malignant disease to the immunotherapy can be predicted with even greater accuracy and can be likely, for example, if less than or equal to 40%, less than or equal to 35%, less than or equal to 30%, less than or equal to 25%, less than or equal to 20%, less than or equal to 15%, less than or equal to 10% or less than or equal to 5% of the gene copies of the immunoregulatory gene contain the DNA methylation. In yet other variants, the malignant disease may be likely not to respond to the immunotherapy if more than 30%, more than 35%, more than 40% or more than 45% of the gene copies of the immunoregulatory gene contain the DNA methylation, or generally in the presence of DNA methylation.

[0060] The immune cells interacting with cells of the malignant disease can be T lymphocytes, B lymphocytes, antigen-presenting cells or natural killer cells (NKs). Any combination of these immune cells is also possible. In certain variants, the immune cells include tumor-infiltrating T lymphocytes and/or B lymphocytes, in particular tumor-infiltrating CD8+lymphocytes and/or regulatory T lymphocytes (Tregs). However, it can also be peripheral and/or lymphatic T lymphocytes, B-lymphocytes, antigen-presenting cells and/or NKs.

[0061] The DNA methylation analysis can comprise one or more parts or one or more CpG dinucleotides within and surrounding the immunoregulatory gene. Preferably, the DNA methylation analysis comprises at least a part of a regulatory gene region, in particular of a transcription factor binding site, of a promoter, of a CpG island, of a silencer, of an enhancer, or of a CTCF binding site. The DNA methylation analysis can also comprise at least part of a sequence coding for a transcript of the immunoregulatory gene. Any combination of the aforementioned parts is also possible. Enhancers may be present as distal enhancers remote from the gene, for example. Enhancers can also be located near the gene and are then known as proximal enhancers. Regulatory gene regions are well known to the skilled person and are described, for example, in “Gene Control” by D. S. Latchman, 2nd Edition, 2015, Garyland Science, Taylor & Francis Group. LLC. For example, those parts or CpG dinucleotides whose state of methylation correlates with the transcriptional activity or the expression of the immunoregulatory gene are also suitable for carrying out the method according to the invention.

[0062] The transcriptional activity can be identified, for example, by an altered chromatin structure. So-called “open chromatin” can be associated with a high transcriptional activity of a gene, as described for example in “Genetics” by W. Janning and E. Kunst, 2004, Georg Thieme Verlag, Stuttgart and New York. Areas of “open chromatin” are therefore suitable for the DNA methylation analysis of the present invention.

[0063] The determination of regulatory genetic elements is easily possible for the skilled person using suitable databases. For example, in the database “Ensembl” such regulatory elements are annotated, as described in “The Ensembl Regulatory Build” by D. R Zerbino, S. P. Wilder, N. Johnson, T. Juettemann and P. R. Flicek, 2015, Genome Biology, Issue 16, doi:10.1186/s13059-015-0621-5.

[0064] A suitable primary sequence of the human genome, on the basis of which suitable and preferred regions and sequences of immunoregulatory genes for the DNA methylation analysis of the present invention can be determined, is for instance the human genome version of the Genome Reference Consortium Human Build 38 (GRCh38) or Genome Reference Consortium Human Build 38 patch release 10 (GRCh38) as of 15 Oct. 2017. In the following, regions of the genome are referred to in the notation “chromosome number:position of the first base of the region-position of the last base of the region”, e. g. “2:203583059-203583108” for the region from base 203583059 to base 203583108 of chromosome 2.

[0065] The DNA methylation analysis of the CTL44 gene preferably comprises at least a part of one or more of the following regions: a region comprising the CTLA4 gene and the adjacent co-methylated genes CD28 and ICOS (2:203551590-204126647, SEQ ID NO: 1), a region encoding the transcripts (2:203867786-203873960), a promoter (2:203866174-203868926 and 2:203869477-203874095), an enhancer (2:203874152-203875266, 2:203876672-203878051 and 2:203879313-203881585), a region between CTLA4 and the adjacent immunoregulatory gene ICOS (2:203872383-203939876), a region between CTLA4 and the adjacent immunoregulatory gene CD28 (2:203738066-203867984), one or more regions selected from SEQ ID NO:51, SEQ ID NO:27, SEQ ID NO:48, SEQ ID NO:28, SEQ ID NO:29, SEQ ID NO:50. SEQ ID NO:32, SEQ ID NO:33, SEQ ID NO:30, SEQ ID NO:49, SEQ ID NO:31 and SEQ ID NO:52.

[0066] The DNA methylation analysis of the CD28 gene preferably comprises at least a part of one or more of the following regions: a region comprising a coding sequence of CD28 and a promoter (2:203551590-203754454), a region comprising the coding sequence (2:203706475-203738912) and a region comprising a promoter (2:203677265-203707326).

[0067] The DNA methylation analysis of the ICOS gene preferably includes at least a part of one or more of the following regions: a region coding for a transcript (2:203936748-203961577), a promoter (2:203934590-203941036 and 2:203948548-203953636), an enhancer (2:203931099-203937863 and 2:203940518-203949061), one or more regions selected from SEQ ID NO:52, SEQ ID NO:53, SEQ ID NO:34, SEQ ID NO:54, SEQ ID NO:36. SEQ ID NO:56, SEQ ID NO:35 and SEQ ID NO:55.

[0068] The DNA methylation analysis of the CD86 gene preferably comprises at least part of one or more of the following regions: a region comprising a coding sequence of CD86 and a promoter (3:122039741-122154807, SEQ ID NO:3), a region coding for transcripts (3:122054701-122121475), a promoter (3:122054261-122061082, 3:122073513-122079893 and 3:122087703-122093314), an enhancer (3:122098924-122104974), one or more regions selected from SEQ ID NO:65, SEQ ID NO:67, SEQ ID NO:66, SEQ ID NO:70, SEQ ID NO:72, SEQ ID NO:69, SEQ ID NO:75, SEQ ID NO:73, SEQ ID NO:74, SEQ ID NO:71, SEQ ID NO:68, SEQ ID NO:76, SEQ ID NO:77.

[0069] The DNA methylation analysis of the CD80 gene preferably comprises at least part of one or more of the following regions: a region comprising a coding sequence of CD80 and a promoter (3:119523584-119573836, SEQ ID NO:2), a region coding for transcripts (3:119524293-119559602), a promoter (3:119554042-119563668 and 3:119568227-119573274), an enhancer (3:119563379-119568778, 3:119538188-119543511 and 3:119545840-119554325), one or more regions selected from SEQ ID NO:57, SEQ ID NO:61, SEQ ID NO:62, SEQ ID NO:60, SEQ ID NO:59, SEQ ID NO:64, SEQ ID NO:58 and SEQ ID NO:63.

[0070] In a preferred variant, the DNA methylation analysis comprises at least part of CTLA4. In another preferred variant, the DNA methylation analysis comprises at least part of CD86. In yet another preferred variant, the DNA methylation analysis comprises at least part of CD28. In yet another preferred variant, the DNA methylation analysis comprises at least part of CD80. In yet another preferred variant, the DNA methylation analysis comprises at least part of ICOS. In particularly preferred variants, the DNA methylation analysis comprises at least a part of each of at least two of the immunoregulatory genes. In this way, a reliable prediction of the response of the malignant disease is achieved, in particular if only small amounts of DNA are available for the DNA methylation analysis. In this respect, reference is also made to the following example 2. Preferably, the DNA methylation analysis comprises at least part of CTLA4 and at least part of at least one other of the immunoregulatory genes.

[0071] The DNA methylation analysis can also include other immunoregulatory genes in addition to the above-mentioned genes in order to achieve even more precise subtyping of patients by combining the results. In particular, the DNA methylation analysis can additionally comprise at least a part of PDCD1, CD274 and/or PDCD1LG2, which code for the immune checkpoints PD-1, PD-L1 and PD-L2. For example, the DNA methylation analysis may comprise at least part of CTLA4 and at least part of PDCD1. CD274 and/or PDCD1LG2. The DNA methylation analysis may also comprise at least part of CTLA4 and at least part of PDCD1, CD274, PDCD1LG2, CD86. CD28. CD80 and/or ICOS.

[0072] The DNA methylation analysis of the PDCD1 gene preferably includes at least part of one or more of the following regions: a region coding for a transcript (2:241849881-241858908), a region with open chromatin (2:241849051-241853001 and 2:241861820-241862593), an enhancer (2:241852997-241855201), a CTCF binding site (2:241859081-241860074), a promoter (2:241856912-241861429 and 2:241862929-241865230).

[0073] The DNA methylation analysis of the CD274 gene preferably includes at least a part of one or more of the following regions: a region coding for a transcript (9:5450503-5470566), a promoter (9:5445402-5456799 and 9:5458041-5461360), an enhancer (9:5457122-5457702, 9:5463574-5468340, 9:5440647-5441785 and 9:5472191-5473149), a CTCF binding site (9:5440970-5441435 and 9:5446325-5446870).

[0074] The DNA methylation analysis of the PDCD1LG2 gene preferably includes at least part of one or more of the following regions:

a region coding for a transcript (9:5510570-5571254), a promoter (9:5507688-5523442, 9:5491444-5503289, 9:5528150-5534251 and 9:5547972-5571492), an enhancer (9:5479110-5491616, 9:5522642-5528253, 9:5534822-5547690 and 9:5572730-5580962), a region upstream of the coding sequence (9:5496357-5510570).

[0075] The aforementioned features and preferred embodiments of the first aspect are also fully incorporated in the following aspects of the invention but are not specifically discussed again hereinafter in order to avoid repetition.

[0076] In personalized oncological medicine, therapies are adapted to patients with specific types of cancer. A high response rate of patients to a targeted immunotherapy with a PD-1 immune checkpoint inhibitor can only be achieved if patients with corresponding sensitive diseases are reliably identified and specifically selected for the treatment. In this sense, a second aspect of the present invention provides a method for selecting a patient suffering from a malignant disease for an immunotherapy designed to inhibit a PD-1 immune checkpoint signaling pathway. The method comprises the following steps: A) providing cells of said malignant disease and/or immune cells interacting with cells of said malignant disease from said patient. B) performing a DNA methylation analysis of at least a part of an immunoregulatory gene selected from CTLA4, CD86, CD28, CD80 and/or ICOS from said cells of the malignant disease and/or said immune cells interacting with cells of the malignant disease from step A), C) selecting the patient for said immunotherapy on the basis of the presence, absence and/or level of DNA methylation of said immunoregulatory gene determined in B).

[0077] In particular, the patient is selected if the DNA methylation of said immunoregulatory gene indicates that the malignant disease is likely to respond to said immunotherapy. In this respect, reference is made to the corresponding embodiments of the first aspect.

[0078] According to a third aspect of the present invention, a DNA methylation analysis of at least a part of an immunoregulatory gene selected from CTLA4, CD86, CD28, CD80 and/or ICOS of cells of a malignant disease and/or of immune cells interacting with cells of the malignant disease can be used in different ways in personalized medicine. Possible uses are, for example, use for predicting a response of said malignant disease to an immunotherapy, use for individualized selection of an immunotherapy for said malignant disease, and/or use for selecting a patient suffering from said malignant disease for an immunotherapy, wherein said immunotherapy is designed to inhibit a PD-1 immune checkpoint signaling pathway.

[0079] A fourth aspect of the invention provides use of the presence, absence or level of DNA methylation of at least a part of an immunoregulatory gene selected from CTLA4, CD86, CD28, CD80 and/or ICOS of cells of a malignant disease and/or of immune cells interacting with cells of the malignant disease as a biomarker for predicting a response of said malignant disease to an immunotherapy, for the individualized selection of an immunotherapy for said malignant disease, and/or for selecting a patient suffering from said malignant disease for an immunotherapy, wherein said immunotherapy is in each case designed to inhibit a PD-1 immune checkpoint signaling pathway.

[0080] In the aforementioned uses, the immunotherapy may also be additionally designed to inhibit a CTLA4 immune checkpoint signaling pathway. In his clinical studies, the inventor not only recognized that the DNA methylation analysis of the genes of the present invention is equally reliable in indicating a probable response of the malignant disease to such CTLA4 immune checkpoint signaling pathway inhibiting immunotherapies, but also that the combination of PD-1 and CTLA4 immune checkpoint inhibition in one immunotherapy can be associated with particular treatment success. The present invention is therefore distinguished by the fact that it can provide the clinician with at least three treatment options using a single diagnostic test determining the presence, absence or level of DNA methylation of the immunoregulatory gene: a selective inhibition of the PD-1 immune checkpoint pathway (for example as monotherapy), a combined inhibition of the PD-1 and CTLA4 immune checkpoint signaling pathways as well as a sequential inhibition of first the PD-1 immune checkpoint signaling pathway and then the CTLA4 immune checkpoint signaling pathway. The latter option can be useful, for example, if the inhibition of the PD-1 immunocheckpoint signaling pathway causes severe side effects in a patient and must therefore be discontinued, or if the PD-1 inhibition is no longer effective and the patient shows disease progression.

[0081] The immunotherapy designed to inhibit the CTLA4 immune checkpoint signaling pathway preferably comprises a pharmaceutical compound that inhibits the CTLA4 immune checkpoint signaling pathway by binding of the pharmaceutical compound to CTLA4, CD80, CD86 or CD28. The immunotherapy or the pharmaceutical compound may for example comprise an anti-CTLA4 antibody, an anti-CD80 antibody, an anti-CD86 antibody and/or an anti-CD28 antibody. In particular, these antibodies can be monoclonal antibodies.

[0082] A fifth aspect of the invention provides a kit for carrying out the method according to the first or second aspect or for the use according to the third or fourth aspect of the present invention, respectively. The kit comprises reagents for DNA methylation analysis of at least part of an immunoregulatory gene selected from CTLA4, CD86, CD28, CD80 and/or ICOS of cells of a malignant disease and/or of immune cells interacting with cells of the malignant disease, in order to determine presence, absence and/or level of DNA methylation of said immunoregulatory gene. The kit may also include instructions for predicting the response of the malignant disease to said immunotherapy based on the presence, absence and/or level of DNA methylation of said immunoregulatory gene.

[0083] In particular, the kit contains at least one first oligonucleotide pair for the DNA methylation analysis, which is adapted to hybridize to a sequence of the immunoregulatory gene in DNA from said cells of the malignant disease and/or from said immune cells after cytosines contained in said DNA have been converted into uracil or another base having a base pairing behavior and/or molecular weight distinguishable from cytosine, in order to amplify and/or detect said sequence. At least one of the oligonucleotides may be designed to distinguish between converted methylated and converted unmethylated DNA, so that the sequence is amplified in a methylation-dependent manner. For this purpose, the oligonucleotide may be reverse complementary to a binding sequence containing at least one CpG dinucleotide to be analyzed.

[0084] For example, the oligonucleotide can be reverse complementary to the binding sequence if the cytosine in the CpG dinucleotide has been converted, i. e. was originally unmethylated. Alternatively, the oligonucleotide can be reverse complementary to the binding sequence if the cytosine in the CpG was not converted, i. e. was originally methylated. In this way is achieved that an amplification only occurs if the sequence is methylated or unmethylated, respectively.

[0085] It is also possible that the oligonucleotides are designed to amplify the sequence independently of DNA methylation. Preferably, the oligonucleotides are in this case reverse complementary to binding sequences that do not contain CpG dinucleotides to be analyzed. Preferably, the CpG dinucleotides to be analyzed are located between the binding sequences of the oligonucleotides. The kit may additionally contain hybridization probes which differentiate between a converted methylated sequence and a converted unmethylated sequence so that the amplified sequence is detected in a methylation-dependent manner. The level of DNA methylation can then be determined from the signal ratio of the probes.

[0086] Furthermore, the kit can comprise at least a second pair of oligonucleotides adapted to hybridize to a sequence of the converted DNA which does not contain CpG dinucleotides, in order to amplify and/or detect the sequence methylation-independently. With the aid of an oligonucleotide pair designed in this way, it is for instance possible to determine the total number or total amount of genome copies or gene copies, in particular of gene copies of the immunoregulatory gene, present in the converted DNA. In this way, the relative proportion of those gene copies of the immunoregulatory gene which contain the DNA methylation can be determined, as described in the corresponding embodiments of the first aspect. In this respect, reference is also made to the first example.

[0087] In preferred variants, the kit contains two or more first oligonucleotide pairs adapted to hybridize to sequences of at least two different immunoregulatory genes selected from CTLA4, CD86, CD28, CD80 and/or ICOS in the converted DNA to amplify and/or detect the sequences for the DNA methylation analysis. By the combined DNA methylation analysis of at least two of the immunoregulatory genes of the present invention, a particularly robust measurement and thus a particularly reliable prediction of the response to the immunotherapy is achieved. In this respect, reference is also made to the second example.

[0088] Preferred regions and sequences of the immunoregulatory gene to be amplified and/or detected by the oligonucleotide pairs correspond to those of the first aspect.

[0089] The kit preferably includes instructions for use for carrying out the method according to the first and/or second aspect and/or for the use according to the third or fourth aspect.

[0090] All aforementioned aspects of the present invention concern deductive steps in connection with a preceding in viro method, so that no technical step essential to the invention takes place on the human or animal body.

[0091] In principle, however, it is also possible to implement the method of the present invention into a tailored treatment approach for a patient with a malignant disease in order to improve the probability of a therapeutic response. Consequently, a sixth aspect of the invention provides a method for an immunotherapeutic treatment of a patient suffering from a malignant disease with a pharmaceutical compound designed to inhibit a PD-1 immune checkpoint signaling pathway. The method comprises in step I), prior to and/or during immunotherapeutic treatment, performing a DNA methylation analysis of at least a part of an immunoregulatory gene selected from CTLA4, CD86, CD28, CD80 and/or ICOS from cells of said malignant disease and/or immune cells interacting with cells of said malignant disease and predicting the response of said malignant disease to said pharmaceutical compound based on presence, absence and/or level of DNA methylation of said immunoregulatory gene. Subsequently, in step II) the pharmaceutical compound is administered if step I) indicates that the malignant disease is likely to respond to immunotherapeutic treatment with said pharmaceutical compound. However, if step I) indicates that the malignant disease is unlikely to respond or is no longer likely to respond to the immunotherapeutic treatment with said pharmaceutical compound, as an alternative to step II) the pharmaceutical compound is not administered, or administration of the pharmaceutical compound is discontinued or reduced (step III). Regarding the probability of response, reference is made to the embodiments of the first aspect. In this way, the present invention contributes with diagnostic methods to a better typing of malignant disease and thus enables a tailored treatment with an improved benefit-risk ratio.

[0092] During treatment, it is possible to administer in step II) in addition to the pharmaceutical compound and/or in step III) instead of the pharmaceutical compound another or different pharmaceutical compound, which is designed to inhibit a CTLA4 immune checkpoint signaling pathway. As already described in the fourth aspect, a particular advantage of the present invention is that the clinician can be provided with both complementary and alternative immunotherapeutic treatment options with the aid of a single diagnostic test: a selective inhibition of the PD-1 immunocheckpoint pathway or alternatively the CTLA4 immunocheckpoint pathway, a combined inhibition of the PD-1 and CTLA4 immunocheckpoint pathways, and a sequential inhibition of first the PD-1 immunocheckpoint pathway and then the CTLA4 immunocheckpoint pathway. In this way, the clinician can make more targeted and efficient use of the treatment options for the malignant disease.

[0093] The additional or different pharmaceutical compound can comprise, for example, an anti-CTLA4 antibody, an anti-CD80 antibody, an anti-CD86 antibody and/or an anti-CD28 antibody. In particular, it can be a monoclonal antibody.

### EXAMPLES

[0094] In the following, the invention is described in more detail by way of examples and experimental results. These examples are intended for explanation only and not as a limitation to specific details.

### Example 1: Clinical Study for Predicting the Response of a Malignant Disease to Inhibition of the PD-1 Immune Checkpoint Pathway Based on DNA Methylation of CTLA4

[0095] The studied patient cohort included a total of 50 patients diagnosed with metastatic malignant melanomas. Before the start of the immunotherapeutic treatment, tumor tissue samples were taken from the patients, fixed with formalin and embedded in paraffin. Patients were treated with anti-PD-1 immunocheckpoint blockade using pembrolizumab or nivolumab between October 2014 and April 2017.

[0096] For the DNA methylation analysis, thin sections from the tumor tissue samples with a thickness of 10 μm were first prepared and then mounted on glass slides. Using a HE section, the tumor areas were identified by pathological examination and scraped off the glass slides with a scalpel for further treatment. Bisulfite-converted DNA was prepared from the tumor areas using the innuCONVERT Bisulfite All-In-One Kit (Analytik Jena, Jena, Germany) according to the manufacturer's instructions. The total amount of converted DNA was then quantified using a NanoDrop ND-1000 spectrophotometer (Thermo Fisher Scientific, Waltham, Mass., USA).

[0097] In the next step, a DNA methylation analysis was performed, for instance by amplifying and simultaneously quantifying a portion of the CTLA4 gene locus methylation-specifically using a quantitative real-time PCR. For example, a duplex PCR was used in which, in addition to DNA methylation of CTLA4, the total DNA, i. e. the total amount and/or total number of genome copies of the converted DNA, was determined within the same reaction. The methylation-specific amplification of the CTLA4 locus was achieved using primers of the sequences SEQ ID NO:9 and SEQ ID NO: 10, which amplify the sequence resulting from bisulfite conversion of the sequence SEQ ID NO: 13. In the case of complete methylation, this converted region in the genome has the sequence SEQ ID NO: 12. The methylation-specific detection was achieved with a probe of the sequence SEQ ID NO: 11, which carried the fluorescent dye 6-FAM at 5′ and the quencher BHQ-1 at 3′. For the determination of total DNA, a locus in the ACTB gene was amplified in a methylation independent manner. This locus has the sequence with SEQ ID NO:8 in the genome and has the sequence with SEQ ID NO:7 after conversion by bisulfite. This sequence was amplified using primers with the sequences SEQ ID NO:4 and SEQ ID NO:5. Sequence-specific detection of the amplification product was achieved with the probe of sequence SEQ ID NO:6, which carried the fluorescent dye Atto 647N at 5′ and the quencher BHQ-2 at 3′.

[0098] The real-time PCR was performed in 20 μl PCR reactions in three independent measurements each, using for example the following suitable reaction composition: 35 mM Tris-HCl. pH 8.4, 6 mM MgCl₂, 50 mM KCl, 4% glycerol, 0.25 mM of each dNTP (dTTP, dATP, dGTP, dCTP), 2 U FastStart Taq DNA polymerase (Roche Applied Science, Penzberg, Germany), 0.4 μM of each primer and 0.2 μM of each detection probe. The qPCR was performed, for example, using an AB 7500 Fast Real-Time PCR System (Life Technologies Corporation, Carlsbad, Calif., USA). A suitable temperature profile included for instance the following steps: 20 min at 95° C., followed by 45 cycles of 45 s each at 56° C. and 15 s at 95° C.

[0099] The amount of CTLA4 methylation in the converted DNA was calculated using the DeltaDelta-CT method and expressed as a percentage in relation to a standard DNA with 100% methylation. The standard DNA used was artificially methylated DNA (CpGenome™ Universal Methylated DNA; Merck Millipore, Darmstadt. Germany), which had previously been converted using the innuCONVERT Bisulfite All-In-One Kit in accordance with the manufacturer's instructions.

[0100] The response to immunotherapy was retrospectively evaluated according to the immune-related response evaluation criteria in solid tumors (irRECIST). Death was considered the endpoint for survival analysis. Survival duration was defined as the time from the first administration of the immune checkpoint inhibitor until the time of death. Survival data were used for Kaplan-Meyer analysis with log-rank test. Hazard ratios were calculated using the univariate Cox proportional hazard model and DNA methylation values of CTLA4 were logarithmized to base 2. Comparisons were performed by one-sided ANOVA and Bonferroni post-hoc tests. Categorical variables were tested using the Chi-square test (χ²-test). For statistical analysis, SPSS version 23.0 was used (SPSS Inc., Chicago, Ill., USA).

[0101] FIG. 1 shows a boxplot evaluation of the relationship between relative CTLA4 methylation (in %, y-axis) and the response of patients grouped according to the irRECIST criteria (x-axis). Mean CTLA4 methylation was 46.1% (95% confidence interval CI: 31.2-61.0) in the group with progressive disease, 21.6% (95% CI: 11.2-31.9) in the group with stable disease, 7.6% (95% CI: 1.1-14.2) in the group with partial remission and 4.9% in the group with complete remission. These results show clearly and with high statistical significance (p=0.018) that low DNA methylation of the CTLA4 gene is associated with a response of the malignant disease to the immunotherapy aimed at inhibiting the PD-1 immune checkpoint pathway. Furthermore, the results show that the strength of the response also correlates with the level or the degree of DNA methylation of the CTLA4 gene. Accordingly, the lesser the CTLA4 gene is methylated, the better the response.

[0102] FIG. 2 shows an additional Kaplan-Meier analysis of the overall survival of the 50 patients with malignant melanomas during the immunotherapy. Patients were categorized according to a three-level evaluation using CTL44 methylation tertiles, as is common in pathological classification. The analysis shows a highly significant (p=0.002) prolonged survival of the patients in the lower CTLA4 methylation tertile compared to the middle and upper CTLA4 methylation tertile. Of the 17 patients with the lowest CTLA4 methylation in the tumor, which form the lower CTLA4 methylation tertile, more than 80% were still alive or censored 30 months after the start of the immunotherapy. Of the 17 patients with the highest CTLA4 methylation in the tumor, which form the upper CTL44 methylation tertile, and the 16 patients of the middle CTLA4 methylation tertile, less than 40% survived longer than 12 months after the start of immunotherapy.

[0103] Thus, the inventor was able to show for the first time that DNA methylation analysis of the immunoregulatory gene CTL44 of cells of a malignant disease and/or of immune cells interacting with said cells of the malignant disease allows a prediction of the response of the malignant disease to an immunotherapy designed to inhibit a PD-1 immune checkpoint signaling pathway with high reliability. Accordingly, the presence, absence or level of DNA methylation of CTLA4 has been shown to be a reliable biomarker for predicting the response of malignant disease to such immunotherapy.

### Example 2: Determination of Co-Methylation of CTLA4, CD86, CD28, CD80 and ICOS in Various Malignant Diseases

[0104] In the framework of the present invention it was further recognized that the response of a patient to immunotherapy can be determined not only by DNA methylation analysis of CTLA4, but also by DNA methylation analysis of an immunoregulatory gene whose DNA methylation is correlated with the DNA methylation of CTLA4. Particularly suitable for this purpose were the immunoregulatory genes CD28, CD80, CD86 and/or ICOS. These genes are functionally related to CTLA4. Furthermore, CD28 and ICOS are also located in the genome in close proximity to CTLA4.

[0105] The co-methylation of CTLA4, CD28, CD80, CD86 and ICOS was investigated using a genome-wide DNA methylation analysis, for which, for example, the Infinium HumanMethylation450 BeadChip (Illumina, Inc., San Diego, Calif., USA) used according to the manufacturer's specifications was suitable. The HumanMethylation450 BeadChip raw data was generated as described by the TCGA Research Network (http://cancergenome.nih.govl). In total, raw data from 419 urothelial carcinomas of the bladder, 797 breast cancer tumors, 530 squamous cell carcinomas of the head and neck, 325 clear cell renal cell carcinomas, 475 adenocarcinomas of the lung, 370 squamous cell carcinomas of the lung, 265 sarcomas and 473 cutaneous melanomas were used and analyzed retrospectively.

[0106] The DNA methylation analysis included different regions of the genes, which were covered by the beads of the HumanMethylation450 BeadChip: SEQ ID NO: 16 to SEQ ID NO:21 and SEQ ID NO:37 to SEQ ID NO:42 detect DNA methylation immediately upstream of the CD28 gene. SEQ ID NO:22 to SEQ ID NO:26 and SEQ ID NO:43 to SEQ ID NO:47 detect DNA methylation in the coding region of CD28, SEQ ID NO:27 to SEQ ID NO:29 and SEQ ID NO:48 detect DNA methylation in a region between CD28 and CTL44. SEQ ID NO:30 to SEQ ID NO:33, SEQ ID NO:49 and SEQ ID NO:50 detect DNA methylation in the coding region of the CTLA4 gene. SEQ ID NO:52 allows DNA methylation analysis of a region between CTLA4 and ICOS. SEQ ID NO:34 to SEQ ID NO:36 and SEQ ID NO:53 to SEQ ID NO:56 detect DNA methylation of a coding region of the ICOS gene. SEQ ID NO:57 to SEQ ID NO:64 detect DNA methylation in the coding region and the promoter of the CD80 gene. SEQ ID NO:65 to SEQ ID NO:77 detect DNA methylation in the coding region and the promoter of the CD86 gene. The sequence listing shows which beads of the HumanMethylation450 BeadChip were used for the DNA methylation analysis of the respective sequences.

[0107] The co-methylation of these gene loci was determined with respect to the DNA methylation of the sequence SEQ ID NO:51 (Bead cg08460026) of the CTLA4 gene. This contains the same four CpG dinucleotides as SEQ ID NO: 13, which were examined in example 1 by means of quantitative real-time PCR. This allows a direct correlation with the results shown in example 1 for predicting the response of the malignant disease to the immunotherapy.

[0108] First, a methylation value was calculated from the HumanMethylation450 BeadChip raw data for each of the considered bead pairs and for each patient sample. For this purpose, the signal of the bead of a pair that binds to the methylated variant (S_M) was related to the signal of the bead of the pair that binds to the unmethylated DNA (S_U). A bead comprises a bound oligonucleotide and is also called a probe herein. The calculation of the DNA methylation based on this relation was done according to the equation: Methylation=(intensity probe S_M)/((intensity probe S_M)+(intensity probe S_U)).

[0109] FIGS. 3 to 10 show the extent of co-methylation of the analyzed gene loci in the different types of malignant diseases. The gene loci are identified vertically and horizontally, each consecutively by SEQ ID NO: 16 (vertical: top, horizontal: left) to SEQ ID NO:77 (vertical: bottom, horizontal: right). SEQ ID NO:51 (black bordered) comprises SEQ ID NO: 13, which was examined in example 1 by quantitative real-time PCR to detect the DNA methylation of the CTLA4 gene.

[0110] The matrices show whether the DNA methylation of a specific sequence under investigation is correlated with the DNA methylation of the other sequences. A statistically significant correlation between the DNA methylation of two sequences, i. e. a p-value of the Spearman rank correlation of less than 0.05, is shown in the matrix as a grey box. White boxes indicate that there is no significant correlation (p≥0.05) of DNA methylation of the two corresponding sequences.

[0111] The results clearly show that all analyzed gene regions of CD28, CD80, CD86 and ICOS exhibited a DNA methylation that was significantly positively correlated with the DNA methylation of CTLA4 in the malignant diseases studied. Based on this co-methylation, the inventor was able to prove that, analogous to CTLA4, there is also an association between the DNA methylation of the genes CD28, CD80, CD86 and ICOS and the response of the malignant disease to the immunotherapy according to example 1. Consequently, as an alternative or in addition to the DNA methylation analysis of CTLA4, a DNA methylation analysis of one or more of the genes CD28, CD80, CD86 and ICOS enables the prediction of the response of a malignant disease to an immunotherapy designed to inhibit a PD-1 immune checkpoint signaling pathway.

[0112] From the co-methylation described above follows the further particular advantage of the invention that the DNA methylation analyses of the genes CTLA4, CD28, CD80, CD86 and ICOS can also functionally influence each other. Since, as shown above, for example a low DNA methylation of one of the genes of the present invention correlates with a low DNA methylation of another gene of the present invention, a combined DNA methylation analysis of both genes has the effect that both individual results complement each other to provide a particularly robust overall result with regard to the prediction of the response of the malignant disease to the immunotherapy. This mutual “consolidation effect” of the DNA methylation analysis of the genes of the present invention in predicting the response behavior is particularly advantageous for small sample quantities, where the amount of available DNA of a single immunoregulatory gene is close to the lower detection limit of a DNA methylation analysis. In this way, the present invention solves the problem that in routine clinical practice there are often only small tissue biopsies or liquid biopsies available with small amounts of DNA from cells of the malignant disease and/or immune cells, from which the response behavior of the malignant disease must be reliably predicted.

1: A method for predicting a response of a malignant disease to an immunotherapy designed to inhibit a Programmed cell death protein 1 (PD-1) immune checkpoint signaling pathway, comprising:
performing a DNA methylation analysis of at least a part of an immunoregulatory gene selected from the group consisting of CTLA4, CD86, CD28, CD80, ICOS, and any combination thereof of cells of the malignant disease and/or of immune cells interacting with the cells of the malignant disease, and
predicting the response of the malignant disease to the immunotherapy based on a presence, absence and/or level of DNA methylation of the immunoregulatory gene.

2: The method according to claim 1, wherein the DNA methylation analysis is performed on at least a part of each of at least two of the immunoregulatory genes.

3: The method according to claim 1, wherein the immunotherapy comprises a pharmaceutical compound which inhibits the PD-1 immune checkpoint signaling pathway by a binding of the pharmaceutical compound to PD-1, Programmed death ligand 1 (PD-L1), and/or Programmed death ligand 2 (PD-L2).

4: The method according to claim 1, wherein the immune cells interacting with the cells of the malignant disease is selected from the group consisting of T lymphocytes, B lymphocytes, antigen-presenting cells, natural killer cells, and any combination thereof.

5: The method according to claim 1, wherein the malignant disease is a disease selected from the group consisting of a melanoma, a carcinoma, a leukemia, a glioblastoma, a sarcoma, a lymphoma, and any combination thereof.

6: The method according to claim 1, wherein the response of the malignant disease to the immunotherapy is more responsive the lower the level of DNA methylation of the immunoregulatory gene.

7: The method according to claim 1, wherein the DNA methylation analysis comprises at least one gene copy of the immunoregulatory gene of a plurality of the cells of the malignant disease and/or of a plurality of the immune cells interacting with the cells of the malignant disease, and
wherein the response of the malignant disease to the immunotherapy is likely if less than or equal to 40% of the at least one gene copy of the immunoregulatory gene contains the DNA methylation.

8: A method of selecting a patient suffering from a malignant disease for an immunotherapy designed to inhibit a PD-1 immune checkpoint signaling pathway, comprising:
A) providing cells of the malignant disease and/or immune cells interacting with cells of the malignant disease from the patient,
B) performing a DNA methylation analysis of at least a part of an immunoregulatory gene selected from the group consisting of CTLA4, CD86, CD28, CD80, ICOS, and any combination thereof of the cells of the malignant disease and/or of the immune cells interacting with the cells of the malignant disease from step A),
C) selecting the patient for the immunotherapy based on a presence, absence, and/or level of DNA methylation of the immunoregulatory gene determined in step B).

9: A method, comprising:
performing a DNA methylation analysis of at least a part of an immunoregulatory gene selected from the group consisting of CTLA4, CD86, CD28, CD80, ICOS, and any combination thereof of cells of a malignant disease and/or of immune cells interacting with the cells of the malignant disease, and
a) predicting a response of the malignant disease to an immunotherapy;
b) individually selecting immunotherapy for the malignant disease; and/or
c) selecting a patient suffering from the malignant disease for the immunotherapy,
wherein the immunotherapy is designed to inhibit a PD-1 immune checkpoint signaling pathway.

10: A method, comprising:
designating a biomarker, wherein the biomarker comprises a presence, absence or level of DNA methylation of at least a part of an immunoregulatory gene selected from the group consisting of CTLA4, CD86, CD28, CD80, ICOS, and any combination thereof of cells of a malignant disease and/or of immune cells interacting with the cells of the malignant disease, and
i) predicting a response of the malignant disease to an immunotherapy;
ii) individually selecting an immunotherapy for the malignant disease; and/or
iii) selecting a patient suffering from the malignant disease for an immunotherapy,
wherein the immunotherapy is designed to inhibit the PD-1 immune checkpoint signaling pathway.

11: The method according to claim 9, wherein the immunotherapy is further designed to inhibit a CTLA4 immune checkpoint signaling pathway.

12: A kit for carrying out the method according to claim 1, comprising
a reagent for the DNA methylation analysis of at least the part of the immunoregulatory gene selected from the group consisting of CTLA4, CD86, CD28, CD80, ICOS, and any combination thereof of the cells of the malignant disease and/or of the immune cells interacting with the cells of the malignant disease to determine the presence, absence, and/or level of DNA methylation of the immunoregulatory gene.

13: The kit according to claim 12, wherein the DNA methylation analysis is performed on at least a part of each of at least two of the immunoregulatory genes.

14: The method according to claim 1, wherein the immunotherapy comprises an anti-PD-1 antibody, an anti-PD-L antibody, and/or an anti-PD-L2 antibody.

15: The method according to claim 5, wherein the malignant disease comprises the carcinoma, and wherein the carcinoma is a squamous cell carcinoma or an adenocarcinoma.

16: The method according to claim 1, wherein the absence of DNA methylation of the immunoregulatory gene indicates that the malignant disease is likely to respond to the immunotherapy.

17: The method according to claim 11, wherein the immunotherapy comprises an antibody selected from the group consisting of an anti-CTLA4 antibody, an anti-CD80 antibody, an anti-CD86 antibody, an anti-CD28 antibody, and any combination thereof.

18: A method for immunotherapeutic treatment of a patient suffering from a malignant disease with a pharmaceutical compound designed to inhibit a PD-1 immune checkpoint signaling pathway, comprising:
I) performing a DNA methylation analysis of at least a part of an immunoregulatory gene selected from CTLA4, CD86, CD28, CD80, ICOS, and any combination thereof from cells of said malignant disease and/or immune cells interacting with the cells of said malignant disease prior to and/or during said immunotherapeutic treatment,
predicting a response of said malignant disease to said pharmaceutical compound based on a presence, absence and/or level of DNA methylation of said immunoregulatory gene, and
II) administering the pharmaceutical compound if the DNA methylation analysis indicates that said malignant disease is likely to respond to immunotherapeutic treatment with said pharmaceutical compound, or
III) not administering, discontinuing or reducing the administering of the pharmaceutical compound if step I) indicates that the malignant disease is unlikely to respond or is no longer likely to respond to the immunotherapeutic treatment with said pharmaceutical compound.

19: The method of claim 18, further comprising:
administering an additional pharmaceutical compound which is designed to inhibit a CTLA4 immune checkpoint signaling pathway.

20: The method of claim 19, wherein the additional pharmaceutical compound is selected from the group consisting of an anti-CTLA4 antibody, an anti-CD80 antibody, an anti-CD86 antibody, an anti-CD28 antibody, or any combination thereof.

The application's sequence listing, which the Patent Office published only in electronic form, follows.

SEQUENCE LISTING (78 sequences)

SEQ ID NO: 1 - DNA, 575058 bp, Homo sapiens
gggatgaaagtgcaggagaagaacaagcgtgcatgacagctctcattttctctttttaaaaaaaatttaaaatttcttatattaatgtcatgtatttaaaaatttttttttcttatttagtaggacttcagaatgacacagaaaaacaaacatctctcattgtcaagacatacccacccttttccccagaggcaaacccagttctctttttcctccagggaatccagcatagacctctctatgtgtttaggagtttggaaaaaaagaccaagaagggaagtatcttggaagccacttctgctttcctccttgtgacatattaatattccctgcagcaaagaagcacggggcctactatcttcctgaatatgggacaagaaagaggaaaatacacagagaacgccataaatacctatctcaaaagctccatcctcccacacagtcaaattgcgcaagcttgctcagctgagttaacagggagactcttttgcctgcaaacaggtcaatcaccagtaagccattatacttgatacctaccctcttctacaaattaacttagaaattctgattgggaaagaaaagtcaaaggtcagaggaataaaatgggtgcgtaaaattgttttcatagtttacatttatttttcctacaagtttaattccagtaggtaaaatattaaaagtatgagcacctgtaatcggggtcaattgataaagttagaaaattccagtaggtattttgtcctttcagagcatgactctacctttaaaaatgtcaatgagaatgtaatttagatagttacgattgtactgtaagaagaatcacctgatgatttgtagtaaatactctcatgtatatttacatttaacttacatccactgatattttttcctaaaataatctggtaaagagcaaggcaagtcactacaagcagtttcttcagtgatatgtttgcaacttctgtaataacttttgctctgtaattattgcttttcttttcctagaagctcatgtgttgacaaagggaaacataggagtctccattttgtctggagacttctctgttcttctgctttagttttggatacatttatgcatatgatagcaatgctaagtaaaagttatattataattagaatatatggtaatgtaggatgagtaatatgtgtgtgtgtgtgtatgtatgtgtgtgtgtgtgtgtatatatatatatatatatatataacagagattctttgctattaccacaacaaatcatgggaaaccacaagggcttttcatgcatttttctatttaaagggccgtctatatagaatatttgtcaaatccctaccatgtactaagtgaaagatttctttcctaaatatttttaccatttttcttacttatagtttataattttatttaatagaaacattatttcctttaagtattatttaaagggaacatggcttttaattaaataccaatgtttcagctgtgcatggtggcacgtgcctgtaagcccagctgcttgggaggctgaggcatgagaatcgctcgaacctgagagctggaggttgcagtgagctgagatggcaccactgcactccagcctgggtgacagagcaagactgtgtctcaaataaaaaaaaaaacaaaacccacaataaaacaaataaatatcaatgtttgttgaaactattccttaattatatttccttaaacttattctaaagaaaaagatatatacatctgccactaattacccatgtctatatatcatggttcatagaatctgggacattaaaactgcacacacggaagccagcaattagctgtcagtgtaacgtgaggatgtgtgtctgactttttccttaagattccaagaaacaagagaaaaacctttttcctccagcattttctgagtggcatagcaattgaagaataaatcatctacatcaaaatttttatcacatagaaatgtgtactcctagagtattacacagaacaaagaattaccatggataatttcttctggacttttggctttgcctgaccttctgtcactctaatcttcatccatcatgtattgattcaccaaaaaacttttattgagagctagtaagctctcaaatatactatgaatcaggtatattcttagaaacataaaagcaaatgcagtctacggccgaaatgctgaattgtgtcccatggtcactgtgggagctcagttctactaactaacttggtttggggtggtggtggtgagggagggtggctctgagtttcagattgaccacttggcatagggtgggtgctttgagggctaaggcaatgggaagcggctcaaccagacagtctcctgagagtaacagccatgcagtcatgtcagagcaatgagtagaatcccaggcaggtggtctgtagtagggaggcctggaagtgtgtagcactgccctggtttgtggtagtgctattccttttcccaagaggtcaagagccagatggatcacaggcctagagtacctagggtgagaactatgaaggatagtattgtttaccaccccaaagcttccccagcctccttcctttgctgtgaggggtagccatgtgatccaattctaatgcaagaactattaaaagatgtctgttgggagtaaggggcaggcttttgagaaatcttttgctttcctgataaatagggttaagcatacctggcaagaacattttttcttacttttgttttccagccttgaatatgagcatgctgcatgctgcagcagtatatagtgatcaaaggcaacaagccaaggatgatggaagaacaagagagaagcaggctggttctttgacattggacagccagagtcccagccctggatggcctgttccagacatcttgtcaagtgaaaaaaaaaaaaaaaaaaaaaaaacaaggaacacttgtttggttaagccacgattgggatttctgttgcttactgtcaaacatatacctaattgaaatagaaacaaggctaaaactctatggaaaataatgagatggctgtggggattcagctattgaggtgggagtaagagatgagagatgcaggaaactaggatgaaactcagtgataaggataaggcagagcacaattggcagaaggctgattttcagatttcttttcttttttttttttttgagacagagtctcgctctgtcacccaggctggagtgcggtggcacgatctcggctcactgcaacctctgccccctgggttcaagtgattcttctgcctcagcctcccaagtagctgggactacaggcacacgccaccatgcctggctaacttttgtattttttgtagagacaggctttcaccatattggccaggctggtctcgaactcctgacctcgtgatctgtctgccttggcctcccaaagtgctgggattacaggtatgagccaccatgcccggctgattttcaggtttcttagataccctatgaccaaacaggattggactcagaacccgggagaggggtaaggcatctagattagggcatggtgaggtgttttgtttgtttgtttgtgagacagggtctttgtcatctaggctggagtgcagtggtgcaatcagaactcattgcagctttgatctcccaggctcaaggaatctgcccacctcagcctcccgagtagctggcactacaggtgtacactaccacgcctgtctaagtgtgtttttttttgtttgtttgtttttgttttgagacagagttttgctcttgttgcccaggctggagtgcaatggcgtgatctcagcccactgcaacctctggctccctggttcaagcaattctcctgcctcagcctcctgagtagctgggattactggcacccaccaccatgcctagctaatttttttgtttgtttttttgtttttgttttgttttagatggagtttcgctcttgttgcccaggctagagtgcaatggtgcaatctaagctcactgcgacctctgcctcccgggttcaagtgattctcctgcctcagcctcctgactagctgggattacaggcatgtgccaccatgctcagctaattttgtatttttagtagagacggggtttcatcatgttggtcaggctggtcttaaactcctgacctcaggtgatctgcccacctcggcctcccaaagtgctgggattacaggcgtgagccactgcgcttggcctaatttttgtatttttagtagacacaatgtttcaccatgttggccaggctggttttgaactcctgacctcaggtgatttgcccaccctcagcctcccaaagtgctaggattacaggagtgagccactgtgcctgtcccaggctaagttttagaaaagtttttgcatagtatcccacggtgtatatgatactgtgcagccataaaaaaaggatgagctcatgtcctttgcagggacatggatgaagctggagactcagcaaactaacacaggaacagaaaaccaaacaccacatgttcttactcataagtgggagttgaacaatgagaacacatggacacagggaggggaacatcacacactggggcctgtcagcaggtggggggctaggggagggatagcattaggagaaatacctaatgtagatgatgggttgatgggtgcagcaaaccaccatggcacatgtgtgcctatgtaacaaacctgcacattctgcacatgtatcccagaacttaaagtataataaaaaaaaaaattaaaaaaaatttttttgtagaaatggggtcccactatgttgcccaggcaggccttgaactcctgagctcaagtgaccctcccaccttggcctcccagagtgctgagattacaggcatgagccactgtgcccagcaggcatggagagttttgagggcagagaaggagccaaatctatgtcttctattgtcaaatttctcttaaaattttatcccattgtttgaaagctccaagatcatgtctttcatcatgcaaacccaaaagtaaatactatttttctttttggaaaatcacaacatgtctttcctcattgatagattgactaaaatacctgttaaagtgattgatctaaattacaaaaatgagagtcaagaggtcttacagaactaacacctatggagccctgtgattcagctgagaaaaatatgacaataataataaatatagtattatattagtgaagaaaatgaatcacatttaaagatgtttaaagcctttcttattaaaaagtagaaagtgtacaggagaggctgggcgtggtggctcacgcctataatcccagcactttgggaggccaaggtgggcagatcacttgaggtcaggagtctgagaccagccgggccgacatggtgaaacgctgtttctactgaaaatacaaaaactagccgggtgtggtggtacacacctgtaatcccagctacttgggaggctgaggcagcagaattgcttaaacctgggaggcagaggttgcagtgagctgagattgcaccactgcactccagcctaggtaacagagtgagattctgtctcaaaaaaaaaaagtatataggaggtataaaatgtagcaaaataagacttgtcatctgaatatgtaattaaattctatttctaactggaataaaagaaaatattctggaaatccattatctgtatttgggaatcctggggaaaaaaagggaagaggtaggttgggcgcagtggctcatgcctgtaatcccagcattttgggaggctgaggcgggcggatcacaaggtcaaaagatcgagaccatcctggccaacgtggtgaaaccctgtctttactaaaaatacaaaaattagccgggcgtggtggcaggcgcctgtagttccagcttctcgggaggctgaggcagaagaatcacttaaacctgggaggcagaggttgcagtgagccgagatcgtgccactgcactccagcctgggctacagagtgagactctgtctgaaaaataagtaaataaataaaataaaaggaaggggtaaagttaggattgagaagtgaggacacagcctgtgtaggtgtgggtagagagaaggtctaggatacagagggaccctgatgactgcctgggctcaatcttggatagatgactactcccctgactttggttattcttttttttttttttttttgagacagtgtcttactcatcacccaggctgaagtgcaggtggcatgatcataactgactgcaacttttaactctcaagtgatcctcctgcctcagcctcccaagtagctgggactacaggcatgtgccactatgcccagctaatgttttattttttgtagagacaaggtctcgctatgttatctaagttggtctcaaactcctggcctcaagcaattttcctgcctccagctcccaaagtgctgggattacaggctggttattcttgatatcaaacttccaggcccacccaaagaaagctctgatttactaggttacatagagcttcatccagaaagagcttgatccactggatagagactgaggtgtgaattgtctctaacaaagtttaaattctactgaagttcattcctagaaagtctgacctagttggttggctttacacccatgcaaagtcattttgttgttaaaaagaccttactctatttcagacttggttctttcaatgggtttcccaaagagctcttcagccagtgttcagctattgaccaaatggttggctccagccagaaatctgatcagaaacatgactgaaagggaggccttatcttcaagcctaaatgggagctgcacagaagtgaccattttctcagggagattgggtaatttggttgagaaggcttgtcctccacctgtcagaggaatcctcagtctaaagtcatggttctttcaaggccaggaacaaggatttagttgtggagaccctgacacatttatcatacaggaaaataattaattcttcattccgagtacacataggccatgccagagtctccctgtccccacaaagatctctttacctgcttgattatgctgaaattcctttccttgacagctcttttcattgacaattagagataaaagacaaatgcctcattgaagaagtatcttgactgatgctcattcataccacagtgataggccaattaattaacaagcctaagtgactgatttggcagaagctatgactccttgaagtggatgatgaggtgaagagaggtctacatagaacaggaagactggaatgagttttattaaaagggcagatgatagggaggccaaggcgggcggatcacctgaggtgaggagtttgagaccagcctggccaacatagtgaaaccccgcctctaccaaaaatacaaaaaattagccaggtgtggtggtatgcacctgtagtcccagcttctcaggaggctgaggcatgagaatcgcttgaatccaggaggcagaggtttcagtggactgagaccacaccacagcattccagcctgggcaacagagtgagactccttcttaaaaaaaaaagaaaaaaaaatggggagaggggagatggggactctaaaggcaaatgtcatttattctactcaagaatattgcttttcacttgcacaatgcacacttcttattatgtagaaaagctattatttattattattattacttactatgtagcaaagttgtgatttaaactttagcgaagtttaaatcacgacttcactaaaaagcagtttcattccaaatagaactggtccaggtttacatagtaagctactatttcatcattgttattgctatttctttttgttgttgttgttgttgtcgtttgtttgttttgagacaaggtctcgctctgttgcccaggctggagtacagtggcgcaatcatggctcactgcagctttggcctcccaggctcaagtgatcttcccacctcagccacccaaatagctgggacaacaggcacacacagccacatccagctaatttttcaattttgtgtagagacggggtctcactctgttgcccaggctggtttcaaactcctgggctgaagtgatcctcctgcctcagcctcccaaagggtaaggattacagttatgtgccactgtgcccagccttaattgctatttctgctaactaaaataataatgatgacaatacaaatgcacatacacatatcacttaatgacagaaacctataaaataagcaaattcagatgattcacccaaattgttgactcaatctctttctcaaataggaggaagtggaagtcctatcctctctcctcacatttgtgatgccctaactccatttacttttacttcttaggaactcaccttcaatgccgactcaggagtttttattttccattttaatccttgagcaaatgattttttttcatattttaaagtgtatcttttatccaaaaattactgcattataaatttgatgtgaaagccaaaggcagacatttaaataagtgaatattctgtatcaattaaatagaaatttggctgacattatttttccttgtgcacattcaacatatgctgtgagcacagtatgaaatgacacatttttatagctagaaaaaagtattggaggccatttttgtcactattgaatgcttcatatatattagtgtttagaaaagagttgtgtgatccttgaatcattttaaatcacatttaaaagtacgctatgtggaaatgaaggacatgacagaagtataaggaaaaaattgtaagaaaagataattctagccgggcgccgtggctcaagcctgtaatcccaacactttgggaggcagaggcgcgtggatcacgaggtcaggagttcgagaccagcctggccaacatggtgaaaccccgtctctactaaaaatacaaaaattagccgggcatggtggtgggtgccggtaatcccagctactcgggaggctgaggaaggagaatcacttgaaaccggaaggcgggggttgcagtgagccgagatcgcgccactgcactccagactgggcgaaagagcaaaactctgtctcaaaaaaaaaagaagagataattctaaagtacctttgtaggatattgccaatcgcagtacatttactgaagagaatgccaatttgatttgttgagaagtctgaaattaatattaaacatgtttttagacattattttcaagttctgtggcagagacggccagctgtccccccaaaacctttccctcttatggttatagctattgctggaacatgactcctgagtcagggtctagatttcctggcctcccttgaacctaggtgtggccatgccatagttttagataatggaaagtgagcaagagtgaccaatgtcgcttctgggccaagacttttaagaagcagatattccttttctatcctctgccatctcctcttccttctccttcatctgactggaggcacatgatgatggggctttagagaagtggagccccagatgcatagaccctgggtccccaaatcaccatctggaagaaagctgcctgccaacctattttggggcaaaatagcctccaagatgtgtaatagctgtaagacaatagaagtttcttagttacagcagctagtggtaccccagcaatacaagtacccttattattgtcatttactaaaaatttccaataagatgttctgctggactttatttatttttttgagacagagtatcactctgtcaccctggctggagtgcagtggtgtgatctcagctcactgcaacctccgcctcccaggttcaagcgattcttctgcctcagcctccatagtagctgggattacaggcacaagccaccactccaggctaatttttgtatttttagtagagatggggtttcaccatgttggtcaggttggtctcaaactcctgacctcgtgatccgcccaccttggcttcccaaagtgctgggattacaggcgtgagccaccttgcctggcctattttaagtgctttttatgtattatctttttttaataattttttttttttgaggcagagttttgctttgttgcccaggctggagtgcagtggcacaaccctggctcactgcagcctcaacttcttggggtcaagcaatcctccagcctcagcctcctgagtagctgggactaccggtacatgccaccatgcccagctaatttaaaatttttaaacattttttgtagagatggggtctcattttgttgcctgggctggtcttgaacttctgggctcaagcaatcctctcacctcagcctcccaaggtgctggaattacaggcatgagctactgcacctgacctcaggcatcctattaagagagttagtgaatggagtgattataacctaagatcaatcttcatccagaaagcatacccaagggttgctaatggaatttcaactagaacaggggttttatgttttgccatgttgactccaactctctctagagtggcaaagaaacagaaaataccaggtctgcccagacctacaagaattgaatagttacaagttagcagagcacattccaaatcacacaaaaaggcttactctaaatgcaccatgactactatctgggttggttgcattttccaaatcagttgtgtggggttgggaaccttaaactatctagtttaaatttagatcaagctcctatatcaaattcccacactcctcccttgattctaacctcccagaataacattctctctaatcctttgctctccttcctgcttatctgctttcatttgttcttatagcctaatccactttataagatctgttcaggctcccatcagggctaatgctttagtctcctcctggctctctgcgatctcctgtttttagctccaacagctgggatctcgaagccctcacttgtaggctcagccctatgtttatatttgggaacaattctttggcagggctgggagaatttaaagagtcttaggccagtatctagacaactcagcctcaagccagcctgtctactgatgccattttaacactcttcttgtatttattcagcaattaccatgccctaccacccaccccctaccatatgccaggcactgtgtgaagtattggagagacatcataccaagacacagtccttaccttgagagcctttaggtttagaaagttagatgggcaagttaaccaatgaccaaccatggctgtgacaggggcatgcatgggactctcggagccctgggagaggcaccaaccttgggttggggtgggggagtggtcagaaaggcttcccagaagagttggtttctgtataaagatgaaggatgagtaggagttacctaagcacataaggaaggagagagagacagtgtgtgtgtgtgtgtgtgtgtgtgtgtgtgtgtgtgtgtgtgtgtgtaagccagaggatacatgaagcacagcatcttccaggagctcttaagtagctctgtttggcagcataacatagtagttaagatcatgatctcaaagccagaccacctaagtttgaattctgactgctgctatgtgacgtagggcaagatactgaatctctttttgccttagtttctccatctgtaaaataggaatgatgatagaacctgccttataggattgttgtgaggagtaatacacctgatacatacaagtgtttagattgcctagaatagtgcctggtatatagcaaaatgataagggtttgttattacttaggtatagtattacatgaaaagtagggagtggccaaagaaaactcttgtgtggcatggtaagaagtttggattttaaaaccattcattgaatccctattgccctcaaggtaatcagggcagatagcctcaacatgagttttggcggggacaaactgtattcaaaccatcgcagaagctatagggcattattaagtttattctcccctccaccaaattagcattataattatatttgcaatccaaaatttgggatggtaataagtttccttccacctaggctatgcatttaattgtgtgggaagtatataaacaaactaacgctcttcaatacttattttgaaggccggccagaagcagtggctcacacctgtaatctcagcactttgggaggccaaggcaggcagatcacttgaggtcaggattttgagaccagcttggccaaagtggtgaaaccctgtctctactagaaatacaaaaattagccaggcgtggtggcacgtgcctgtaatcccagttacttgagaggctgaggcaggagaatcacaggaaccaggaggcagaggctgcagtgaggtgagaatataccactgtactccaccctgggtgacagagcgagattccatctaaaacaaacaaacaaacaaacaaaaaagaaagtcaagcatgataggaaggaaaagacagaaatggtcaaaagaatgtaaccttctgcattaatggttctgcttttctatgggagtggaattcacatattgctttgggaaggcaatattcttaccaaaaatgattttctatgtttcttgaacaccacatgatctacaaggggatctattctgtgacactactctatttgaatcattagtcaatacattttaacacaatggaagctataaaaacagcataaaaagatctggaagtttctcagatatcctgccttctgagataaatggcttgttataagggaaaaatcttgttcctatttcttaaggtacaaattaaaccactgggttttcatttaagtccagggactttattaacatggcaaaatagaaaagaattgcccaaggtaaaagtcatattgccactgattcattgcaattagctaattggcaaactctttttccccttcccatggaagaaagagaagcctgtgagctcgagagccttagagatcatttttctacagatgaagaatcttggataatttttgccagttcagaatgatgaggattgcatatttataacatgttactctaaggcatcatttcttattgtacagatgaaagagaagtgctttaagtttgcttttgtctgacatctagagtcaaccactttttgtgtatatgattctaattatagcaaaaaacaatgtcaatatgtagtcattcttctccatgtgtaaataaatcctttattgaaaaaaatagcttttccctgttctgcttgagaatgctaatatgcaatgtctgttttttgtctgcagttttttaaatttaatttttaaattgacaataatcgtacgtactcatgggggtacatagtgatgttttcctatgtataatgtttagtgattggatcagggtaattagtgaatctatcatctcaaatatttataatttctttgtgtagggaacatccaatatcctccttctggctatttgaaactattaatgtattattgttaactatagtcattctacagtggtatagaacactagaacttatttgtcctatctagctataattttgtatctgtttgcagttgttttttgagacatttttctaaacatctgaatttaaaattatatctgtcaaaacaaaaatacttcttttatgtattttccaagtaataaaactgactcagaaaaagaatactggcaccagttggaaactccactagttacaaaatcacacataatttgtgcaaccttgaagtctggagctgcttgtggaaactcatgccatcagccctccaactcaattaagtacagatttgttaacatcactgctggctgtgtaacctcagtggatgcaggcaaagaaatataaggaagctgtggtaacagacagatgtgctactctagacttctcatcatttgatattcactcctttgaagtaaaatattttatttcaggagtggcagattaaaatgcaggagcctctggatgaaatgcaacattggaccattgtctgctgttagcaccttaggaataagcaattcattcattttgggaaacgttaggagacctaagcacaggaggccactgatacagtagaaagagttggccaggagactaagggcatcaaaactctaattaccactctactaatagctagttgtgtgactttgagcaaatcactccccttacccagcctgtctttacacattggtagaatgaggatattgttccactccaaatttccacatctctactaaggaagagcaggcacagtgaggtaaactgggcaagtgtaacaatgagtcttgctgtcctgacatttttgtctctgcaaagggagaatgcttgaaggcctgctcccaaagcaactctctaactcctactcagctctgtgcctagtcttgggttgcctcaggtgattggtggttcctgatcaaggagcaaaatccctgcagttagatttgcttcactttgagccccacctagcctggcttgtactcagcttttaaatttttaaaaacatatctgtgaacctaccctttaatgacactctgttctttgagcatgaaatagcccaaaatgcctcaattttatctgctctatggggctctacatccctgatttcctctctcctttcttttcagagtggaacaaaattgccctttaaagggagcattgagtttaccagaggctgattctgattcactcaggaccccttccaatggtagagccagtttatccaaccaccatccctggcccttaaaaaaccagctagcctccttaagaaatccagatactgtgttcgttctgatttatgaaaatcattaggcaaaatgtaaattaaacaccttttctgacacttcacgtcatgatcagaaagaagccaggcctattgcctctgtccgttcaccagtgtgctccatgggagaaaacaaacaagtacagaattcgtattggaacagagtttttgttcttaatcaaagcagcaatagggtaaaacagatttgcagagcttggagaactgtagacccaagctgccccagcttttttcagattaaaaaaaataataagtgaacaaggcaaataatataagtagatgaagatgtgcaaagacctctttttatatccttccagacgttttcagtccataaaaacatccaacacatgtactcacatttttttttctattcctctctctctctataaatgagctcttctgttcatcccacttctgctttcttttcttttttttttttttttttgagatggagtctcactctgtcgcccaggctggagtgcagtggcgcgatctcggctcactgcaagctccgcctcccgggttcacgccattctcctgcctcagcctccccaatagctgggactacaggcgcccgccaccacgcccggctagttttttgtgtgttttcagtagagacggggtttcaccgtgttagccaggatggtctcgatctcctgacctcgtgatctgcctgcctcggcctcccaaagtgcagggattacaggcgtgagccaccacgcccagccactttttatttcttagttggataagtcagagagcataaataagaagccacactttttagacagtctctttataagattagctttggatagaatacagatctccttctaagcaaagacccctttttgtgcttcttggggaagtaacaggaacagtctctgttggcaaaccttccctatgctgtgaaatcgacatgatatctggtgcagttgcatgtattacctgtgcttggcatttgttaattggtggtaattaacatgtttcatttttgaggaaagaagtgagttactgagagatcaagccacaggatggtgggagtaggccaagatccagtgcttgactgttgaacttgctttttggtcattgactgtttctcattatttcaaggacagttattaccattaccattaaaatagctggtttcaagctggcaggtgttaagtacagactaaaagaccgacaaatctcaagacacaaaggtaagtctaaaacacaggagatgaaaagaagtccatgtcagtaagtcaaaaataaaccatgattattattgttggtattctgatgacccaactgaaatgaaataagaattacattgtcattaatttacatactgaaattaatggaaaacagttcttcataggcttgttcctcaggatgagcaaaactgcaattttatgcaagatcattctctattcctaagtgcctcttctgtaattccaggaagatgtgatttgcagtgcagtgagcaatagcaatcactcctttctcctatgggctggagctaatgctcgttctcaccttgctcctcactaagacatgcagcagacatcaatcatcattactgcacagcctgtctgcatccttaattaggaaataacacacaatagagcttagtggcagagtatgcaatattatgcattttttggactatttgtggtaaaaagcaatcccagataaattgcacaatggctttgtgcatcacaaagtgtgagctcagggcatcacaaggtcttaggaagccaaaaccatttgtctggtagaatttcaagaatctaattgaacataacttgtttgcttaagcaattagcaattatcttttgagtataaataaggatgtttccagggttatccctcatattttttatggtaattttccaagttggtttaccttgttgtggttgcctcttgctgtctccttggctgtttatttggcatttgatgcaatttgctgttgatggttccagtaaaattagagagtatgactggatgggaaaataccatgatttatcatattgcttatatcatatttaacatattgttgacttgttgctttgttgtttcattttattgtcatgcctcattttggctatccttgggcaacaaagaatggtggaagttattctgatttaaggaaaatacaggcatttaaaactgcagcagggaaaggaaagggagctaacatttactgagcacctaccatgttccaggcaatattccaggaacattttcttgttttaacctcacaacatacctgtgagatacattattatctctataacgaatgaagaaaatttggataatataactgcttaatgtcacacagctctaaagtggtggaaccaggattggaacccaaatttatctaactcctataattccgcttcttcaaatagtaatggtaccttatatttgtgcagagctctatagttttcaaagcagttacccacatgttatcaccttctgtttccaaacaactctgtgaggtatgcgttattatgaaactttacagaccaggagaaatgatgtgttcatggtcaaacacagaataaatagaggactaggacttgaagatttatgaacttttcacatgataccactgaagccttgggacaaaccaattgctattttaaagaatgcaaattatcttgtaccatgttttctattaccaataactatatatatatctatattctgtgtacatgggaaaataatttgttaagaatcacggcttcagacatagatgttgttatacaattaaaacgatggttaaaatagtaagcagtgaatggtgattcaaaacctaggctaagattagattagaaaacctaggttaagaagcacgttagtgcttggtgttcaattacctttctctaaatctgtactcaaggccaaccctaaaaaaaaaaaaaagatagtaaacaacaggtcccagttagttatctctggttttgtccattttgttcacaaactgtattggtctgattattggtagtattatctgatctgtgtgcatctggtccagataaaggtagctattgaccaagaaaagagataccttcttactgtagcattgatgatgctaccagatgcttttcagtcttgtttaataaaggactgtcttgcccaaggagaggactcattaaaagttgaaagtggagtggggacaaagttggaggagcaagaggaaataggttatcataatgaatgcaagctggagtgcactggcaccttctcggctcactgaaacctccgcctcccaggttcgagcgattcttctgcctcagcccctgctagtagttgggattacaggtgcgcggtaccacgcctggccaatttttgtatttttagtagagatggggtttcaccatgttggccaggctggtctcaaactcctgacctcaggtgattcacccactttggcctcccaaactgctgggattacaggcgtgagcccctctctactggccgctgtctactttttcttagtttcactttctaatccccttctcttttattccctcgtccccctcacaaagatgcttatctaataaacgcattgacaccgaggtgtgaatgactgctctgcttacctcttcaaagagaaatatattacacaatcaggcctctgagtggtagaatgtctctgagaggttcttttggataggagcagtttctgttgttctttgattgtttcaagcagccacttccctaagtttattcatattcccctcaaaatactccgttcaatatgctttcagcgacaagtatttattgggcacaatttgtgatgggcactgtgccaaatgctggggacatgttagtgagaaaacagacatgttctctcacagaatataaactcccggaagacagggaccataatgtatggagctagcattgttttataccagccacagccatcttctcactttggcaaatggctctatactcccttgggctcagcaaaaacaaaaactaatagcatgtatatgggttgtgggttcacagatggaataattcaaaccatggatagggtatctacaacggatacgatgttgcagcctctctccctcccttcttttcttgtcttcattccttcctttcctcctttccccattcttcttttccttcctttattcccttccttctcttctttccctctttcccctgttaccacccctattattcttgaggactgagatagatttacagcaatcagggaagaccttcatgttgggtctagacacacatcatagaccttgccatttgccagctgtgtgcctctgagtttcatttgctcctcatgtcacatgaggacacttaatagctacctgcaagtatgcactatgggtacagaataggtgcacggtaaatggaactcttataattagatttagaatgcctcatcaaataattaattacttttataatactgaagatgttttcttaaggcattatttataaaaagataatatttataataataattctgcacatttccaattgcagtgtattacttgtaggactttctttagcctatttataacttagatgttttttaccatcctaggtagggtcctcatattcgattagctcaactaagcagttgaaaagcctatgccgggcacggtggctcctgcctgtaatcctagcactttgggaagccaaagcaggtggatcacgaggtcaggcaggtggatcacgaggtcaggcgattgagaccatcctggctaacacagtgaaagcccatctctactaaaaatacaaaaaaattagctgggcgtggtggcaggtgcctgtagtcccagctactcaggaggctgaggcaggagaatggcatgaacctgggaggtggagcttgcagtgagctgcgatcgcaccactgcactccagcctgggcgacagagcgagactgcgtctgaaaacaaacaaacaaacaacaacaacaacaaacaaaacaaaaaacaccaatggtcatttgaagtcaagtcttgatagtcaagttggatacttccacttgaggttaaaacaaaacaaaatctgataactataaaatagaataaaagcggggcatggtggtccatgcctgtaatcccaacattttgggagggtcacttgaggccaggagttcgagaccagccaggccaacatggcaaaacctcatctctactaaaaatacaaaacattagcccagtatggtggcatgtgtcagtagtcccagctactagggaggctgggaagaatcgcttgggaagcggaggtttgcagtgagccaagattggtcactgcactccagcctgggcaacagagtgagactctgtctcaaataaataagtaaaatagtaaaataaaatataataaaagattatgatgaatatagcacataaattgactttaaaaacaaatcagaagtagaattctgaaataactttaggcaatgccaacatcattggaatgacactgctttccaaggtaactgctttagaaatttaacttctaattcatttatgaaaatgcagtcttgtaacttattaatgacagttcatgccaacatggtctaagaaagaaattccaagaacttaagcactgtactcttgacaattcaggtacatttttactccagtgcttagtatgatgccaagcattttgtggcaactgaataaataggagacaatgatgatgcctggctttgatatcagtggaggtgacaatgtaagaagagttggcaagacattagtgactgtgtactggctgcttcaagattgctggcattgccttagaaagaatgaatgaaattgctgcttactggtagttttttgctctcttttttttttttttttttttgagatggagttttgctcttgttccccaggctggagtgcaatggcacaatctcggctcattgcaacctctgcctcctgggttcaagcgattcttctgccttagcttcccaagtagctgggattaaaggagtacaccaccacgcccagctaatttttgtattattactagagatggggtttcaccatgctggccaggctggtctcgaactcctgacctcagttgatccaccagccttggcctcccaaagtgctaggattacaagcatgagccaccttgcccggccttttttgctctttttttatggcaacttataaaacacgtgcctcgtgcttgtttatgacacagcttatggaaattatgtagtaacgccactgtacgcagaagaacagcccctgacaatgaagaagcctggcacaggacaaacatgaagtggctccttataaggaaagaaagtcttaagagaccacgctaatagtatcaatgatggttaacccaaggggaggactcacagatggttgacctgcaaggtatagtcaaaccaccaaggactttctactctcatttataactttggaagcatttgggtttttttgtgtttttgtgtgtgtgtttttttgagacagagtcttgctctgtcatccaggctggagtgcagtggtgcgatcttggctcactgcaacatcagcctcctgggttctcctgtctcagtgactctcctgtctcagcctcctgagtagctgggattacaggcacctgccaccacacccagctaatttttgtatttttggtagagatggggtttcaccatgttagccagctggtctcgaactcctgaccttaggtgatccacctgccttgccctcccaaagtgttgggattacaggcatgagccacagcgcccagcctatatttttataccaaggtatattaactgatatattggcctggcacagtggcttgtccctgtaatctcaacactttgagaggctgaggcgggcagatcaccttacgtccggagttcgagccagcctggccaacatggtgagagcctgtctctactaaaaatacaaaaattagccaggtatagtggcgcgagcctgtaatcccagctacttgggaggctgaggcatgataattgcttgaacccaggagggggagtttgcagtgagccgagatcacgccactgcactccagcctgggcagcagagcaagagtcctcaataaataaataaataaataaataaataaataaattaaaattaaaaaaaattttaaatgacttctatatgtaaaaattgtggcatatgctctaaaaatacaaaaatgaattctctttggattttgccctgagggagtttacacgttagcagaggaaatcaagataggcagaaataacaagaaaaatagaaagtagaaagtgataaaaattgtttgagaggtacagataaagagaatatttggtcagaaggagagtcaaggaatggtccctggaggaggtaacgtttgaactgagattagagagtgagatcagagaatggcgcatcacatatatcaaatctgtagaagcaaaaatccatgagggagaggagtgaattgtttagttgtctggatgtgggagtgtgaaggggaagggttggaaataaggtgggagaagtaatgagacttcaggcagtaggaagtgaggagcagtaaacagatgagtgataccacctgaactttgctttattaaaaacaatctggtagcactctttcagggcgaaatctattttcagccaatgttaaacaattggcgaatgtccaaacactaaattagcttgagatgttgtccgccattaaatgtgaaccaaatttgggttgtaaatgcatttttaattctgtagctgtagcgttcctgattgacttaacaaattaaacttttcacagatgaatggtgttggtaatatgtgttagctttatattgtccactagccagacatttaaacaaacaaacaaacaaaccaaaaaatactgtgagctggatgaagttctcttgaaaatgcctcaagcatggagagaatattttttccccatgagatgataaatctgggccgggcgtggtggttcacacctgtaatcccagcactttgggtggccgaagcaggtggatcacctgaggtcaggagttcaagaccagcctggccaacatggcgaaaccccatctctactaaaaatacaaaaattagccaggcatggtggcatgtgcctgtaatctctgctacttgggaggctgaggcaggagaatcgcttgaacccaggaggcggaggttgcagtgagctgagattgcaccatggcactccagcttggacaacagaacgagacctcatctcaaaataaataaataaataaataaaataaaataaaaataaaaatgataaatctggaaaaatgctcaggacagaggtagagctctgttcatttatatgtttatatccctttcagcaatatgagaccagtggaatgatttgttgaaattttcttaaacctctgtctgtggcagaatgcaggttagtgcaagcttcttttcagttccccaggctacgataaacccaacatctgctgtcttcctcgtggtggatttaaagccatgcatttggcactagaatgcagaccaggaaatcagagagcttgaccatgttgccttccatgatggtgctggttctgttatcaaacaaaataaaaaaaaacaaaaacccttaaactcaaaaattgttgcgtgtgcttagttaagtccaggcaacaccaaccccaggctggtgaagcgatcagcgaaagcaggagcgggtgcacaattgcaatgatgattcatcctcagaggtgcatgctttcactgaattaaagttgcagtgttttgaacgtagcttttaccaacacagagcttccataaccaagtgtgggagtaataacaggacaagcagattataaggaacttgagaagggattccactactgaggaagcaaaccaagggaatagcttttacacgagacatgaatttttccccacacatttgtgtcccttccaaatatagatttttttttcatgtggtaccaatgactgaaaatgtgggccacacacacacacaataaattcagtgtagcgagcactccgcatgttatagtattacttagaatgtttctttggttgttttccccagagtattgaggtgacgtataatttttagctcagtgttgctgattgtagatggcaaacgatagtgggagatgtgaataaatatatcaaataatgcttacttttacctttttaactaaatatacgtaccatgtatgagactctgagctagactctgcagggtgtacgaaattgagtagagcatagtctttttcttaaggagcttatatctggtagggaacataagataaaggcagttgactggattacaagggaggctatgtgccatgccaggtagatatgttccacaccataagtgagcctgcaggccatacaccatggggacttgaagcagaagaatgtccaggaaatgttaaatggaggaaataggtgtgtgtcttcaaaaatctgggtgctgggaagatggtggccccattcatggaaatagggaagttgggaggaagagcatgtttgcctgtgaatgcgtcaagtttgggatttcagtgaaatatggtgggtataacgtcttggaggtaggtgaaatcttgtctagagagaatttgagactgggaatgtggatagacatgcagggataatagtagaagttgtggaaggggtgagatcaccaagaaaaactacatagagagaaaaagagcactggaaacctttagggaaaacccaattttagagcacaggagaaagaaggggaagtgataagatcctgaattaatggtttgagtagtaggagaaactggagcgtgcagtgcagtgtagcatttaagagaggatttcaggaagaagttgagcaacactgaggactgcaattgaaagctcgaaggaggatgaggacagaagaaaatgggatttagtgattagaaggagattgataagagagcgattgataggggtaaaaactagattaattattaaacatttgctgaagtatacaaaacaaatgacacaaagatcacagtttttcctgttaggacaactgctctgtgctttaatgtcagggaaataatgcaacagcaagagaaaattattccataatggattaagcattaaaacattgccggccgggttcacgcctgtaattacagcagtttgggaggccaaggtgggcggttcatgcggtcaggagttcgagaccagtctggccaacatagtgaaaccccgtctctactaaaaatacaaaacattagccgggtgtggtggtgtgtgcctgtaatcccagctacctaggaggctgaggcaggagaatcacatgaacctgggaggcgtaggttgcagtgagccgagatggtgccattgcactcctgcctgggcgagagggtgaaactctgtctcaaacacacacacacacacacacacacacacacacacacacacacacacttgccatttggggaggttacctgagtctttctcacacatgctaatgtaaacccttctttgagataatggagtggctggtcttcacacttgctattcacactttttaatacaagggaatagcaaccaggtatcactaggcaccagaagtggtggatgtctggagtagatcaggaaacatagcagagaagattccacttcaaagggtttagtatgaagctactttagtcattgatttttctgtcttggagtgccaatttctcctcctgacttgtacacttctcttttttaaaaaatttttgtctttcttttttttctttagttcttctgaaacaaaaaaaagggatacatgtgcagaacgcgcaagtttgttacataggtatacacgtgccatggtgatttgctgcatctattgacctgtcctctaagttccctcccctcacccctcacccgctatccctcaacagaccctgatgtgtgctgttctcctctctctgtccatgtattctcattgttcaactcccacttatgagtgagaacatgcggtgtttggttttctgttcctgtgtcagtttgctgaggatgatggcttccagcttcatccatgtccctgcaaaggatatgatctcattcctttttatggctgcatagtattccatggcatataccacattctttatccagtctatcattgatgggcatttgggttggtgtcacttctctttggactccaagcatttgtctttgatggtgtttttgagtggttacagatgaaacaatgggactatcgctacaaaattgtatgacaaaccttcctcttgccttcttcagtagaattaactagctgatgattatggaaacaaaagaagattgcaacaataatatattttatttctttttttaaaagttattattttttagtgacaggattttgctatgtttcccaggctagcctccaactcttggactcaagcagtcctcctgtctcagcctgctagtagttggaactagcgacatgcccacgatatattttatttctgtattgctttgtacctctcaaagccatttgcatgcatgcccccttttgacctcaaatcagtcctgtggggatagagagagatcttttgggtaggaataaatacacagagagaatatataatctgtttattgaagttcaccaccattgtaaatactgtcttctattttaagactatttttcttctttggattgaagacatgtagatagacaatattgctacactattttttttttacaaccttaagtgctgatagagatcagataattagataaacaatccctgatatatgtaagagtaaacactccacatggatactatatgtaaaaaaataaacaatggaaacatcattgagataaaattagataattatttttatttattgaaattaacactgaaagtggaatgttccaacactgttagggattacagtgagacagtttgactttatcttattcctgaagatgttttcactctttcaatttgacaactcttctataaaagcctttacctggtggattaacagtttgaggtatttagagttaaagaagcgttgttcaagagattggagataaaagcaggggcggggggagttaaagaggaggagactcatttattcatgaattctttcattcatccattcctttaacatttattgataccactatgagttatgtactagatattgtactagatctgggaacatggagttgctttctttcatgaaagactttctgatggaagaaaagaaataatatcattttgaggggaagagttttccttgaaaaccttgaaactactctggtgttggtttcaagcaatggtgtgtttttagaaaatcaaaatttgccaggactggtcatgtttcaactagtgtgttgatttaattcttactcaagggagaaaattgccacttggatcatcaaccccagtttctgtggaatcagatctttctccctgcctctgaaagcccttatataagaactgtccagagttaaatgaggggtgacaagttcataacgcagaaggaacattgtgtctctgggctatcaaaacattgatcacccatccagccatttagcagggtattcccttgaaaatctctggctcctaatgaacagtataaatatgtgaataggaaggctagatttggaaagctgtctgtatgagaagaaagtacactgatgacagaacacacatatgtatcccatgagttggcagcagtgtgattatgttgacgatgttgacatttgacagtcagagcccaggacatgatgtctttgagaaattcttcttaagttgggtatattttttcctagtagagtaagagatagagttggaagtgattgcctattctatactgataagaaagacataggctttgtagagttcaggaccttggctggcacttctcttggctgatgaagcaagccagcatggccagttctactggtggttatctgagccagtctgcacaggtccctgattgctatgaatcagcactcgtaggttccacaggcagtaaggaaccagaaatactggtttctaccaacagttggtctcagaaggactggtgtgactaaccaactgtaagaacagcctcaaatcctttctgggaagaggcagggtttataaataaacagaaaacaaacacaactgactcaaactgaaatttgtggctctggtttgatgtggtgaatgtatttaatgtagcccaagagagaaagctgaggtctctacatttatgaaattactaaaagattgcaatcactgttcagcattgtctaaaaatatcatgtacagtgtcgaagacttgtactaatcatatgattaatagaatgattatgacagtgctctataaataagggtatgaagtggcagtgtaggggccaagggaaagcttcccctttgccctctgaaggttggctgaaaaatcaactcacaaaagcagattaattggagaaaaggcatataaatgtattaatgtgtacacagacaagaaccgcagagtgattaccctgatccctcagtggggttcagaagcttataagccatcttgagcttacacaaagaaggggggggcttggattgtgacaaaacagtttatggtgacaaaacaggttatgggagagggagaagaggaggcctggctagcaaaggtagtcttgcctgccgggtagcagccctcagagagaatagaaggtaaatgattccttcagacctttgaaggtgtcagacttccagttaatctttcctagatccagccaagggaaagtctcagagaaagcctggctgcagcaatgtatagcttccagatgcatattttcctgacaatagacagctttccagggctacttctctttgcaggccctctgaagagccatcacaaagtatgtcaaataaatatattctggggtgaaatatttttatttccttcaatagtgaatagagacaagtatggactgttttaacaaaacaaaataaaagcatgccaataatagacattagagtattaactactcattgcatatgcctgcaattctgtttgtaatggtaaataatctagcatttatgtaaacttttttttttaatgcttcccctctgtttgaaactaaaaattcccaggctgggtgtggtggctcatgcctgtgatcccagcattttgggaggctgaggcaggtggatcacctgaggtcaggagtttgagaccatcctggccaacatggcgaaatcctgtctctactgaaaatacaaaaattagccaggcatggtggtggatgcctataatctcggctactcgggaggctcaggcaggagaatcacttgaacccctggggcggaggttgcagtgagccaagatcgtgccagttcactccagcctgggcaaaagagtgagactctgtctcaaacaaacaaacaaataaaaacacaacaacaaaaagaaactaaaaattctatttaaaaaaaatagccaaggctctttacaatttatcttctttactttaaaaagaatagagcagcaacatctgagtaaagtacattttttacatttcaaccaatccttatgtaaaagacatctaaaaaggtatatattagcatttttagggctttttggaattataaacagattgacagctctgtggcctggagttagtgctgtttatttcctagactgatatagcagcggctgtagttccatgcatggcaccctgattcccaggattaggaatacaaaggctgatttgtggggaggagagttttctggaagcacgtgcagctgccactggcgcatgccagcacattcattagccaatctgacagcagagctgatgtctactctcagcttttcggggcaaagaaaggcacatgatgccaaagggccttctcattcttagctgaacacacagaagggtaaagccaggggttcccatgatccttcctttttcctggatcgttagctgtcaggatctcaagtaatcatgaattaacccctgtaaggcatctgaatgaatgcctaccttattttaaacctgaataagtaaaaccctcttaaagattgctgtttcatgctgcccgccccatccccccaacccactcccttttaataatgtagcaacatggagattgaagtgggtaatttttctctttgtatactgtctttttcaattctggaacaggtccagaaattataaattgaattgaattataaataagtattgaatattgttttgctattcccaatacatttaatactgtcaattattttaattgggctagtcatttcagaatttaaaatagtaaaggctcagtcaaggttgcatcagggattcctgatacttgggaaactagaaaacaacaacaacagttcaaatccatgtagcttcattcaaatcattcatgtactggcgtatgccatagtccttaacctgaccctaccctgtggttcataaaactgtcaactaacttgcatatcatccagatgtcttgttttggctcaccacatttcagacttcggtctgtgaatacttgcaaatattttcttttttctttttcttttctttcgcttttttttgagacggagtctcgctctgtcaccaggctggagtgcagtggcgcgatctgggcttactgcaacctccgactccctggttcaagcaattctcctgcctcagcctcctgactagctgagattacaggcacgtgccaccacacccagctaatttttgtatttttagtagagacggggagtcaccatcttggccaggatggtctcaatctcctgacctcgtgatctgcccgcttcagcctcccaaagtgttgggattacaggcgtgagccaccgtgcccagccacaaatgttttcttaaataatttagcatacattactggttgtctcagaatatttcagcaataacgtaatagtctttatttataactaataaaactaggataatccagcagtggaaaccaatgaataggaggcaactcaccatggtcttgctggttttgccaatgccaagccagaggaacacaggcaaattatgaaattcctctgggtagtatcacagaaaagcaaggagaatttcaaagccgggccaggaggtgctatttaggtagagatattaaacataatcacagtttaagtgattatataaaaaggggctgttacagaaacagtgaaatctttatagcctctgataggatacttgatgggcttccaaatttgcgcacttccctcttgaagagagttagatcttttgactagagggctagatctctctcctctctgaatttcaaaagtgttaaaataacaagcaatgtctagctgggtgattttccacattcgtcctgtctaaaggaagaagtttgttctactgtaaacagttatgggaactgtttgctttggatgggcttggtcctcattggctgaggaggactttcttactctggtttcttgccaaggtagaaattcaatgccaaaagcttcctagtcctgtctggacatcctctaatcagaataaatttgacctaaagaaagtatgttggagagctgcaagcatggtagtagtgccttgaaaaaaaaaaccagtcgatttaagtagtagattgtgcggttcagtagcatggaacaaagttcattgtcatatcctggacagaacatttcttggatcttttcttgctccacctctaaccagaaaaggctctatcctgaaactatatttgcatgtatgcaagccctttgaaattcttacactcctttgcgtctattaaaccaagaggataagcaacctggtaatttagcacggtcatgagcatttatctacacagtgggctccaaatgggtgtctgaaggtgagttgagtgtggatgttagaagccagtctttcattctagtctttcaaatattagctgtacaaagtggattatttatacaagttatagttctaagcacagtctctagagccaaactgccttcagtttgaatcctgcctctaccaattgtttggcaatcgaccctggacaaattgcgtaagttcactatacctctttctttgcctctgtgaaatgggcattgttgtgaggtttcaatgttaatatatgtgaggaacttagatcaatactcaggaacaagtaagtgctcaataatattagctgtttttattttctccttctcttgaaattacaagtgatgctcactgactactgactcattgtctagcttgatgcttctggctggagaaggatttataagggagtgagaaatgtgtggatgtgccatctgtccacttttacttctaggtgtatccgtatctgtgtataaaagccaaaaaaaaggcccattaaatgctcaaacatttatgaagacttttctcaaaaaagactttcctggcttttaagctgttaggcaaatcagttctatatttaaatatcattctgtccttttgatggttgaattcaaattgtgcctattatagctgactcttaatcgtaggtggtcctgtgccaatcgtgtaagactactgacaatgatctatggcaacaatcatttctgtacacaagttgtggttgactaaatccacatattctctcaggtgtggggcagaacctctaaaatgccacagtgagtgggaggtggggcatttataagtagcagatcattgtacaaccatttcctgtgccccagcctcctctgacctcagctacttttttaaggtactgacccacagcctctgctatgagccatatccccagcacctcctctgtgcagctccagtagccacttcttgtcttggaggctggctgtgtcatgcagtgttgcagattatgctaagtgaatccagtatctccttgttgctccctctgtcaaggatctgcagtttgtggatttaatatgtggagcacatattcatttattaattcaccacttaggcatgtattaaggcccactatacactaggcattgcactaagcattgggaatgtaaatatgaccaaagttcttcttcttctttttttttttgagacagggtctcactctgtcattcatgctggagagtagtggtaccatcatagctcactgcagcctcaacctcctgagctcaagcgaccccccaactctccccactccccacaactttgctttaggctcccaagtaactaagactcccagttaatattttattttatttttttgagacagagtcttgctctgtcatccaggctggagtgcagtggcactatctcagctcactggaacctctgcctcctgggttcaagtgattcttgcgcctcagcctcctgaatagctgggactacaggtgggcgccactgcactcagctaatttttgtatttttggtagagatggggtttcaccatgtttcccaggctggtctcaaactcctggtctcaagtgatccacccacctcggcctcccaaagtggtgggattacagcaccgcggctagccctttatttttattttttgctatgttacccactatgcctagcctgactagattcttgatagcacctcatgactatatattagactctagaggtgaagagaaacacaggtggatatgacaaaggtagcaaaatggtgtggggtcatggttagaaacatggactttgagcctgagtgtttgggtacaaattcttactcagccacttactagctgtgtgaccttggacttcataataacttcacttctctatgcctagtttccttatttgtcaagtggcaactgtcattgtacctagggttgttgtaggagttaatatttatgactatgtaggggagtgtctgaaacatagtaagtgctatgtaaacatttaagtaaataagtgcagcaatcgagctatatacagggtattataggagtaccttgtccaattagcaatatcaaacttttgcttctgttcaggtctgtccaaggtatggggacatttccgaagtcaggagaattaaaaaaaaaaaaaaaaagccagagtttggctgctcagcatcagtgcagcattagtgcaggccttagcccacaacttacttccactaatgaacatttgtctcattccttgggtcaaatttctacctggtatctttgtcctagtaaatgagtctttgtcctattttcctgcatctttagtctctgcctaaatttctggtcaagtcctcagttcttctggaacagaggttctgccttgatcttgctaatttgcatgcccgtaagctccactctccaagcagggttccagctaccagctgccaggcctgcttgctgcctgggtttctgaatattacttgctctaggagtccccattgctatttttcttccatgcatttagccacccatctgcctattattctactctcctgacactatgccctgacctggctggtgtctctaattgcctgttttccatgtggctgcctggcccttagggacaggtgtttgatcttatcatctcacttatgccttgttcggccaccacttaatcttccctactgacaagaaagaaggtggcaaggaagaacggctgagtgagacactctgtgttgctcatcaagtgacctagtttagtttaccaaggaatgtttgggtgtatctgttgggggtagcttatcataaataactatgcatagccatatgtgtaattaggaggggcttgctctctacaaagtttcctatgtgaagactttctcttcttgatgccccagttaaggaaattcctttactaatttatcttcctgaataacccgtcctccctgaataatcagtttcatgtgctgtcccactgctgctaaattactctaatgaagtcataatactgtggttctgggctttcaagttcagtactttctacgtatttttcattcttagtgtttgcatgcaggctaaacattctaggacgtcatggtttcccctctgctccccaccattcctatttttacttctcggagttttccaaaacttgattatagtcaatgtcagcccaaagaatttccctttccctggaatcacttctgttgaacatggccacttttgttttgaataagaaaacctaatcatctcaattacgataataacctcgaagttgcattactgacgagggtgtcatgaaagtgagtcaatagtggaaggggaataaagggcataatataatccccagctcttagcaacataacctaattttcattcagtcccatgtagctgcctaatttccattaggcgcatgctgatttcttttagccccatgcacagaagacgatcttattttcccttcagttctatttggtacttagagttaattggaaacttaattataagtgctagaagtcatctgcagagtatttctcatttgtgatttattatccatttttatggtatgcatttattttcttgatcgaaataattttcattttaaatagcatctgacatttgcaagggttttaaagcacattcatatatgctatctcattaattctcacaacagtcctgtgaggtaggcagaactgttattatgcctatgctacagacgagaaaataatggcagggaaaaagattgtgggagaataaagtaaaaagtgcataggaggaagagcctgatgattaagcactgcttgcagctctggcgttgttgactatgagctgcatgcctctaggcaagttacttaaactctcaagctttgtttcttcatctgaaaaatgagggacttaaatttagggtttcttgcagttctgagtctgtgtgatgtttgtttaagccggcatattcatattaaccttccctactcaaccgctgataggtgaggaatacacacacacacacacacacacacagaagtacacacacacacacacacacacacacacactcacatcaaggactcctttgggcccaagagttgagataggcaatcctgaagtgagggggctgggagaaccagggaactgagcatgtaggaagagatgatttgctcttgaaaaggtgtagtggggctgggcacggtggctcacatctgtaatcccagcactttggaaggccaaggcaggcagatcacaaggtcgggagatcctggctaacacggtgaaaccccgtctctactaaaaatacaaaaacaaaattagccaggtgtggtggcgggcacctgtagtcccagctagttgggaggctgaggcgggagaatggtgtgaacttgggaggcagagcttgcagtgagctgagatcgcaccactgcactccagtctgggtgacagagtgagactccatctcaaaaaaacaaacaaacaaaaggtgtagtgaatattcattctaggttgagtgaggtggcaagtcccagctgggacagctttgggaccagttcagtgcaaatttggaggaattagaggttgggaaaaggttggaaaagtgtttccttttaggggagaaacaaactggacatcaattacaaagtttcactgtatgttggctgatagaaatatagtaaccattcgaattttgtggctgggtgtggtggctcatgcctgtaattccagcactctgggaggctgggcagatcacttgtcaggagttccagaccagcctggccaacatggtaaaaccccgtctctacaaaaacaaaatacaaaattagctgggtgtagtggcacgcacctgtagtcccagctactcgggaggctgaggcaggagaattgcctgaacctgggaggtggaggttacggtgagccgaaatcgtacgactgcactccagcctggagacagagcaagactgtgtcttaaaaaaaaaaaaaattacaaaaattagctgggcatggtggcacgtgcctatagtcccagctacttgggaggctgaggcatgagaatcacttgaacctggaggtcacagtgagctgagatcgtgccactgcttttcaccctgggtgacagagctaggccctgaataaaaaaataatacttttggaaaaaaaaatagcaccaaaactctgaaagtaaagctactctataaatgcaaaactgtgatgttatttatttatttgagacagagtctggctctgtagcccaggcttaagtgcagtggcacaatctcggctcactgcaacctccacctcccaggttcaagcaattctcctgccttagcctcctgagtagccgggactacaggtgcctgccaccacacccggctaattttttgtatttttagtagagacgaggtttcaccgtgttagccaggatggtctcaatctcccgaccttgtgatccgcccgcttcggcctcccaaagtgctgggattacaggcatgagccactgctcccggcctatttatttatttttttgagacaaagtttcgctcctgttgcccaggctggagtgcaatggcacgatctcggctcaccgcaaccactgcctcctgggttcaagcgattctcctgcctcggtctcctgagtaactgggatcacaggcggccgccacttcacccagctaattttgtgcttttagtagagacggagtttcaccgtgttagcggggatagtcttgatctcctgacctcgtgatctgcttgcctcgccctcccaaagtgctgggattacaggcatgagccactgcaccccacccgatgtttttgaaacaatggatttattaatctttgcatgagagtcttgctgtaacattttggaaagggggaggctttttcttcctttttgtgtgttacaatgttatgtggctaacatttagccaaagaaggatgtaaccagaagagtatctgttttgcagcacataacctagaaggatttcaattctagggctcacatcatggtgtctgtgtgtgtgtgtgtgtttgcctatgttatattttaaatagcttagctgcttctgtgattatgccaccttttttttttttttttttttgagatggtgtcttgctctgtcagccaggctagagtgcattggtcccatctcggctcactgcaacctccgcctcctgggttcgagtgattctcctgtctcagcctaccaagtagctgggattacaggcatgcaccaccacactcggctaatttttctatttttagtagagacagagtttcgccatgttggccaggttggtctcgaactcctgacctcaggtgatctgcttgcctcggcctcccaaagtgttgggattacaggcgtgagccacggcgcccgacctaccactttttgatatctgctagagccatcatcttctcctgatcactggtaatcaatctctgacagaagcatagcagaaccattggaaaacagtacttaactgatggcggaagtgagacaagctcagtgtgggcaaggaggctgcctatgttattcaccctaatcatctgagtccctggcaatagtagatcctcaataaaatcgtgggtgaataaagcatatttctcctaaaactataacaattattgttatcaacagaggaaacatttgcatgatgctacaaagtaagcaaaataagaaacaagctctctgtgtgaagttaaggtaacagggcttcagatagtaccttgaaaaacattatttaaggtaggggctcttgcctgtaatcccagcactttgggaagctgaggtgggaggattgcttgagcctaggagtttaagaccagcctgggcaacatgttgagaccctgcctctgaaaaaaaaaaaagaaaaaattagctgggcatggtggtgcacgcctgtggtcccagctacttgggaggctgaggcaggaggatctcttgaactcagaaggttgaggctgcagtgagccatgttcaaaccactgtactccagcctcggtctgagggcaagaccctgtttcaagacaaacaaaaaacaaaacaaaaaacattattctttagtgaatatcctgcctttatttctgagatcacaaagcagtggagtgtccctggcttttgaatagatagcgatagtttctgtatgggcaagaatttgttcctttgctgaatattttgagaagtgagtatcccatacggaggttggtgagaataccatatgcatcttgattatcctgacagcccagaaaaggaaccaaggtaaaattgctagagggtaattttctgtggtctcagcttgagactgcaaagcagagcatgataaggggacaagtacctccgcatctcatggaaaggatctagactaacatcaggtctggctaacaggtgcccaaaacagtttccacaacctgtggcccccacccatctcagacaagagagttcttttgcagatttttttttaaataacaactttattgagatataatcacgtaccatcagattcacctttttaaggtgtgtgattcagtgatttaaaatctattcagagttgtgcagccatcaccactgtctaattttagaacacgtttgtcatccccaaaagaatccctgtactcattagcagtcaccccccatttctcctcccagccactgccaatcactaatctgctgtttctatggatttgtctgttctagatgtttcatttgaatggaatcatacaacatgtgactttttgtgtctggcttctttcactgagaacaatgttttcaagcccaggtgtggtggctcatgtctgtaatcctagcactttggaaggccaaggtgggcagattacttgaggtcagcagtttgagatcagcctggccaacatagcgaaaccctgtctctactaaaaatacaaaaattagcctggcatacaaaaatggtggcatgcacctttaatcccagttacttgggaggctgagacacaagaatcacttgaacccgggaggcagaggttgcagtgagccgaaatcatgtcactgtactccagactgggcaacagaatgaaactgtgtctcaaaaaccataattaaaaccaaaccaaaacaaaacaaaagtataatgttttcaaggctcacctatgttgtagcgtgtatcagtatttcacttttttttacagtggaataatagttcattgtaaagatataccatattttactcatccatgcatctgttgatggacatttgcattttttccactttgggactcttatgaagatgctgctatgaacattcatttacatttttttgtgtggtcttaggagaatttgaccttgttccctgaagtttgtgagcatagagtatgaagtctgttccttgtctagacatgggattggctggagctgcaccttagagcaaagaggagagccaagattgtagtgggagtaagccacaattctacagtactcagggtaagtgttgtgttttctgaagactagagtgcacactgtggaagatacaaccatttttaaaacaccttgcccaacaatactatctgtgtggtgcattattttctgacccagagctaggggagaatcattagtggtcaccaggggagtatattttccatctgagaaaaaaaggaaagtgttggagatccccagtggaggttgagggtttttctaaaaaacacacataagctcccttcaagagtgagtcagctggcatttgaacatgggtcccacagaacataccaacatccaaagaaaacagcaccagctaaataatgaagaaccttttgctttttacttctcctttctcctctatccctcactggggaggaacaacaaaccacagagtaactggggtgtgactggaataagaacatgctccacttccctactgcaggttactgggacccagtaagacctgacctggaatgtaagagaggaagacttgaagaagaagaaagagtgaagtttggatattaaagaaggctgaacctgtatagtatcttttttttgttttttgttttttgtttgtttgtttgtttgtttgttgagatggagccttactctgtcacccaggctggagtgcagtggtgccatctcggctcaatgcaacctccatctcctgggttcaaacaatcctcctgcctcagcctcccaagtagttgggactacgggtgtgtgccatcatgcctgactaatttttgtatttttagtagagatgaggttcattatgttgaccaggctggtcttaaactcctgacatcaagtgatctgcctgcctcggcctcccaaagtgctgggattacaggtgtgagccactgtacctggtcccatgtagtatcttgaaataagattattacaaaagtgaaaagcactggaaaagttacagagtttgctcaagatattgtctggggtcaggaaaaagagattggacagagcaagtctgaagcacaagcacggcagaaaaagaaaataaagccatttcctgactgcactttatagggtcctgcctgattaataaacaagcttttgtcagagtaaagttatctctgaattgggactgcttagggcttctttaaccctggaactgtgctaaaggtgccttactgtagctgggaggtggcatccactagtggggctgccaatcaaagggccttgcctcccccattgcaaaagtaggtgtatgtgcaggctgaccaattaggacaacctgtttccaggtgacggtgatgggtctggaggtgggcacatgactcaagcagggccaagcagagtccttgtctgtagagggttaggaatggcaaaagtctttctcttcctgagatcatgaactgtaaacattatgcatacttgttgtgtccagaattgtctttcccttcacgtggtaagagcttgctggagaaagaagccaattcagagagaagtgagttgagagacagaaacagagtccacctgattcatgattacattgatggaaaaaaaaagactcagggatctgttttcttttaatttttttattatttatttattgagacggagtctcacttccccaggctggagtgcagcagctggatctcggctcactgcaagctccacctcccgggttcacgccattctcttgcctcagccccccgagtagctgggattacaggcacccgccaacacgcccagctaatgtttgatatttttagtagagacgaggtttcaccgtgttagccaggatggtctcgatctcctgacctcgtgatccgtctgccttggcctcccaaagtgctgggagtacaggcgtgagccaccgcgcccagcctttattttttatttttagaagtcttggaccaatggtgcacggagctgagtaaatcatactcctcagttcttgacatacatcactacttggtgtgtaaaagacaacattcacttaaaaaattactgttcttcatccagcattccctctctcattctcctgttactacaggcaccacttaaatgtgtttatgtatttttcaaagatacatacatacccaataacatatattggcatcgttttgtgtatatatgtgtttttaatataaatttaaattaaaaaggtaatacaaatggcattatattatagatttcactaagattctttttttttgtttttaacccagtactgtgttttaaagttctcaccacactactgtatataacccattggcccaactgtggctagagctcctaggttcagtaaagctccgactaccatgaacaatgctgtcattgacatcttcatgcaggtctagggatatatgcagaaatggaattgctaacactaacttcaggacattttaattactgcataattaatgcattctctttttgcataagccattgttaatgagtttatgtgacttttacccaaaggatgcctggttaatccttgcctgttgaaggtgaagggtaccatgtcctatctgctggccacctctaactttcttaggagaggccaaaaataaagtagcctttttccatgtcccttcagcactcccagccatgcttttatttacttatttattttttagagacaaggtcttgctttgtcacccagggaggagtgcagtgatgtgattctagttcactgcagtctctaactcctgggctgaaggcatcctattgcctcaggctctcaagtagctgggactacaggcaggtatgaccatgcctggataattaaaaaatttttttttcctgtagagacagggtcttgctacgttgccaagggtactcttaaactcctggcctgaagcaatcctcctgcctcagcctcctgaagtgctgagattaaagatgtgagccaccatgcccggcacacccatgcttttacactcaataattggtgcctcctttggaaaaagtctcaatacttctgtttcacgtgatggataatacgcatctataggtgttgttttattgaaaaagtgttttaatttttaaaaatccatgttaaatgttcagaacatagaaaaatattttcaaactttggaattgcaattatgtttgcagcagagatatctattaatgctaaaaatactttactagatcaatcatcttaataataaaatcttattaaaacagtcttttctcaccacaggaatgctagttatgagactttggttagggagatttccttctgcaatccatagatctttctccaagtgttttttgtttactgaacattttgagatttctcagaagtcttcctgtgagacactgctacagaaaccccctttccatacacaaaggtcagctgaagtagctgaaggataatgaaatagtcctctgttccttgattatgagctgatagcaatcatatgaagttcaacagagatgaagtcaatgcacataaatataaaagtattcattgatgttaaccctaacattaaacaggttcaggaaggggtaggcctggtttgatagcagctcatgtgaaaaagacacagaggcaatgcatgtgtggggatagggggaatatgggaaatctttgtacctttcagtcaattttgctgtgaacctgaagctgttctaaaatgtagtctattaaaaaaggaaaaaaaggagagatattaattgaccttaacttaatatatagcaacagtctgtaaaggctgttagatgcaccaatgcaatgtaatggaagtgttatcctgtgctcagcctgggggccagggaaaagaatcactctcttctcctttctagttttaccatttctggggtgttattctgagaaccaagcttaaaagagacaaagacaagtgagaggcttgtagattaggacaattagcatggaaaataaatttagaaactataatgccaggaaagaccaagggaataccagctgccttcaaatacttggaggacttaggtgtgaataatggcaacattttaacttaggtagcatctcacaatttccaaagcgcctttatttttattatttaatttgatgcttatattggctttgtgaggtagacctttataaaacggtaagctgttttataaaggaggaaactcaagctcaaagagattaacttcattttgctctaagtaggatggtggttaagtggagatgttgggacaagaatgcaggcctcttgaattatatttagtgttctttcaatgacataagacatcctgtgcttttgtagaaagtgaactaagggccaatggtagtgaagcagaaggcagtgaattcaatataaaaatttttcaaaaacactggcaagaactttccgataatggaagggccagccccccaaagttgtcaacttttccagtggaaattagataatcgtccttcagggatattgtagcaaagattccagtatggaaagacactggacaatcttactggtttccataactgttattttatttgtattagactgagaaagaaacaaacatataaatatgctggcaacctgctgtgttttcattaatcagtttgctaactagggctgaaatctgaaaacaaaattccatttgaaaaatattattcaggctgggtggcagatgaatgactcattgatatgtttttgtcaatcttaattctgtttacttactggtcatagtacattggtgttgatttctcttatacttcagccatgtctcttaataccagttacactgagagacaaagaacaagagaataattacgaaaaatcagactttgggaactgagctgtctgggttgaggtcacctcaaaagctcacgaagtctgatgtttgtgcagcctcaagtatattttttactgtgtgtctgaagctcatgacacgatcaaggttagtaactatggagactggtgtgatttatttaccactgaggaggtttagcactgacagaatcagaacaggcttcctcatgcaaacggagtgcctgcctatccttattaaggggatctggggaaaaaaagatgaattaatgcaaacgatgaattaatgcaattaaatgaggtcacatgaaagtaaaaaggagaaagaaagggcttgaaaaagcatgggaactccttttttttttttttttttttttttgtgagatggagtctcgctctgtcgtccaggctagagtgcagtggtgcgatctcagctcactgcaagctctgcctcccgggttcacgccattctcctgcctcagcctcccgagtagctgggactacatgcgcccgccaccacgcccagctaatttttgatatttttagtagagacgaggtttcaccatgttagccaggatggtcttgatctcctgaccttgtgatccgcccgcctcggcctcccaaagtgctgggattacaggcatgagccaccgcgcccggccatcctgttccttctcatccctgtgtctctgcttatacagttttctcttttcagaatgcactccttatccagggtagtgaccttctagctcaccccaccggtccaaaccccacctcttacacaaagtcttcctgataaaactaaccaacatttatgtctccctttttggactgtgtcaggcagcttctgtaccatgcctatttgcagtggattacattcataaaatgggctgaacattgtgattatttttcccagggttgtcccccatggatatgcattttttgttctgcccaagggcacctggccaaagagttgagtgggagcggagacccagcccatgctcctttctccatgccagtagcatccctagtgcctttctgaattctcaggaaacatcagtggatgagtgctggccctggctgtccctgagtattacccttgtgttcaccatgtctccccaatgggtttgtataccccttgagagcaggggctctgtcacaacttctgcattccccatgtggcctagccttaggtaaatgttccttcgcttgacttgaacacagacaaggaatagaaggaggtctttttttctggaagtgaagcacagagaaggtggtctataaaggagagagaaggaaaaaggcctggggaaagaaagtggaagcaaaggggtttgaaaatgcagagactgggctggacacagtggctcatgcctgtaatcccagcactttgggaggccgaggcggtggggatcacgaggtcaggagttcaggaccagcctggccaaaatggtgaaaccccatttctactaaaaatacaaaaattagccgggcctgctggcagatgcctgtaatcccagctacttgggaggctgaggcagagaattgcttgaatctgggaggcggaggttgcagtgagctggaatcatgccaccgcactccagcctgggcaacagagtgagactccgtcgcagaaaaaaaaaaaaaagaaagaaaatgctgagaccatgtattagtcctgctttttttcttgagctccaagagcagattgattttctttggcatgtctggctcctaatctttcattctatccaagggctattgggcaccagaaagaagttctcaatggtaaggtgctgggcgtatgggggcaatgtcagcatgtctgggtcctgctggttgccggagctgggctgggggtctgagtgtttaggacaaggcccagcatgggtttggaatcacagaagatcagcaatagtgattgatcttcaggagatgacctgacgtatctcactggatcccatgggaaaaaatcccaagaaaacccttcttctcccaaacaacatttctcttcccttttcaaaatgaagttaccttcaagcacagtcgtgtcttttgcaaatcatgttttctggtggggcttacctcagagtcctatgtcagagccgggcgggcctagctgaccaccttcgcattgaatttctcttttttcagagtcaatgtcaattatgcatatgacttaagaagaaatcactggaccgtttcattgtttcctctctgaaacttcccttacctcaaaccccaaaccaaaaataccaaaacctcaccgctcttgagcaagccaccagaggagtgagaacatgtctgaggagtggctgtgagcggccaaagaccagttgcagacagaagaaaataagaaatacatcaaaacgatggaaatctgaccgggcacggtggctcatgcctgtaatcccagcactttgggaggccgagatgagaggatcgcttgagtccaggagctcgagaccagcctggccaacatagggagcttgtgcctctataaaaaataaacaaaattagccaggtgtcgtggcgcatgactgtagtcctagctacctgggaggctgaggtggaatgatcacttgaccccaggaggttgtggctgcagcaaaaaaaacatctcttaaattttcatactttctggaggcagggtcttgctctgttgcccatgccactgccactgccactgccactccagcctgggcaacagagcgagaacctgtctcaaaaaaaaaaaaaaaaaaaaaagcaagcatgacaatttaagagttgctttttgttttgtcagtaagaaaactggattcatttactataggcaaaacttattaggtgggatgggttttggatgatcagaggaagttgaaaatgttgccaatagaacagttctaagggatgattaagtctccctctttgacatgagcacagacctcattagctaatgtctttcacatctgggtagaagtagcacaagtaaaatcatggtgtggccaggtgtggtggctcatgcctgaaatcccagcactttgggaggccgaggtgggtggttcatgaggtcaggagatcgagaccatcctggctaacaaggtgaaacccccgtctctactaaaaatacagaaactagctgtgcgtggtggagggcacctgtagtcccagctactcgggaggctgaggcaggagaatgtgtgaacccgggaggcggagcttgcagtgagccaagattgcgccactgcactccagcctgggcaacagagagagactccgtctcaaaaaaaaaaaaaaatcatggtgtgatgcagcataaacagatgggatttttactgaacagtgaaacaaaaaagcacatcatgaaaactctgtctcctgaaatagatgctttttgtttaaatacaccctgatacccataaacaacaaaaatgaagctcccttgaagtagatgctgcaaaactgtttcatgtctactcaaaccaaaacttctggtttgtggtatggaatggcaaaaaggttctttaaacgtagtagctttcttctttgtaaacctggactaagtagacctctgggacctgggacaagtcactcgatgtacctaaacttcagttaactcatctgcaacatggggtttaacgatgccatatgggttaccatgatcatcaaatgacatagtccacgtaaaatagatgtttagtgcaatgcctggagcctaggtctcaataaatgtttgctatccttatggtttagcccagtggctaaccatctagattccagtgccagcatgtctgtctttggatcctgcctttactattaatacttactggctgtgcaattttcagccagttacttctctgttcatccattttctcaacttttaaatgaggagaagactaccaaatacttgtatggttattgtgaggattaaaggaaataagcctttagagcactgctaggcacacagtgagcacatactaagtgttaattatttttattattctgcaaacagaactttgctgttgataagatgcttctcctgcctgctctgcattctctaccccaaatcttggaattcttagactgtatagctcatcctttctttttacatttgagctactagaaatgcctcaattcacaaactctgtgggataccattccctctgtcctgggaccacattcagtagtgtgaaagtggaggaaccagggacacttacgtatgcaagagccctgatgttagctcctgttggtcttcctccacctcgccccttccccagcttagccctgggggctcaaatatcatcctaaggatcttgggggctgtagaattgaatgagaaccctgacgaatacaacatcctttttaaaatctccactcagaagaggaattttacagtagacatttaagtctttgtgtaaattttaaatcaatgtgtcacagctgggcgcggtggttcacgcctgtagtcccagcacttgctgggaggccgaggcaggcggatcatttgaggtcaggagtttgagaccagcttggccaacatggtgaaaccccgtctctactaaaattgcaaaaaattagccaggcatgatggtacatgcctgtaatcctagctactcgggaggctgaggcaggagaatagcttgaccctgggaggcgggggttgcagtgagccgagatcgtgtcactgtactccagcctgggtgatagagcaagactccatctcaaaaaaaaaaaaataaaaataaataaatcaatatgtcacaattccagagaaatagtctcattttaagatcctttgctgattctaaaataaaagtctttatttcattgaagagatttaaggcattaggcagtaggtggggggaggattttggaaattctcctcctaaaataacataattctcactctaagtctggtcttgctaataatagcaaccacaatataatgatttttaataacagtgactacaatgaccattgaagtgacatgtgataggtacaagtgggctatgccctttatataaatctttttttttttttttttttggagacggagttttgctcttgttgcccatgctggagtgcaatggcacaatctcgactcattgcaacctccaccttccaggttcaagcgattctcctgcctcagcttcctgagtagctgggattgcaggcatgcaccaccacgctcggctgattttgtatttttagtagagacagggtttctccatgttggtcaggctggtcttgaactcccgacctcaagtgatccgcccgcctcagcctcccaaagtgttgggattataggcgagagccaccaggcctggcctatgtaaattgttttattcaatcctcactgcaacccttgtaggatggtattattatattatccatttataaataaagacattgaggctcagagaggttaaatgattgcttaggagcatacagatagtagtcgttaaagagttgggatttgaacctagggctgtgtgtcttcagagactgggtgtggactcatcctccatgccatactggagaaaactaagctttgggggaacctttgtgagacagaccagaggtcctctttacctttctttctgtaggttttcctgcccttcttgcacagatggccgtaaacacatgattagctggcagaggctgccttgactgagtctccatttcacagaagcggcaatagagtgattctgtttctggcgtctcagtgcaggcactgctgagtcgtgtgcttgccagagccttagcttagctggattctgatctgttaactctgtaccttgttgcagtggtgtgatggtctcaggctccttttctacctacatgtgagattttatactaagtgaacttctttttttttttttttaagatggagttttgctgtttttgcccaggtggagtgcgatggcgcaatctctgctcactgcaacctccacctcctgggttcaagcaattctcctgcctcagcctcctgagtagctgggattacaggcatgcgccaccacgcccagctaattttgtatttttagtagagacagggtttcaccatgttggccaggctggtcttgaactcttgacctcaggtcatccacccatcttggcctcccaaagttttgggattataggcgtgagccaccgcacctggccgtaagtgaacttctgaggaaaattataccaaaacttgttttttgcgcatgctcaactagacaacctgaaaatggagttaaaacatttcacagtcccagagatttcataggttatcagttcttcctgtttcaggtcaaacccccaaatactcaaaatacctccaaaataattattcttactctcttgaaaggaatcaatgtttataaaatacaggagagagcctgaagactgtgctttgtctctgtctaatgtgatgttctctgtgggttctgttaaaaggtacaagagaaggtctatgtgtaatgcatattcaattctgctatagaagaaagcaaatgggagggataaagcatacaagaaataccgagcacacatagaaatcaagctagcagcttatgagatattggtaaaactcccaggatgttaagtttagataatgagtaaggaaattctgcctgccttgcgtggcaggcagaattcataagatgtgttaaatatagacagtaagttagtaatctgtaaaacatattaaagaaagatggaataaagcaatatatgatgggaaaagaaagaatgttacttataagtagaaagggatgaaaagattaagtcctaatcatgcccctctggtctgacagctacatcattcctaaattgcccatccaatggtgatacccattctgatcccacatgtttgtgcccaagaaatgcacataaaacccagaggtgctcagcaggctaattgggaagctatagctgtggtcaagcctacttgcccctggacccctttgatagagcaagtgtgtcactggcccagggcaccttctctctgggaaccccttgctgcaacctcatcactttatttctggccctcataaccacacgtcagtaggggaggctgatgtggcagagagagataggagacacatgcactgaccctgccaagactcaggtagtggggtctttccacccgttgcatcctatcctaagtgtgttcacttacctgtctctttcacgttgctttttgtggtgtcttttatattgatttacgaaatcatgcaattcgagcatatttagttttgaggctttgagcctttccaccaaggtaggttcctacacgacatccatattaatttccatttgaatcttttcactagtatcatctatttccttggataacacatcagcagtagatactttcacttcatcagaggacctgggaaagagccgtgccaacagagtttggaatggaggcaaaactaattttggagagctccaatgtgtgttgaaaaagaaagcaatcaaataattgtgttgtatcacatcctgaatatggtctcaggccttctgccaggtagtcagagaacattttttatgaatttgattttttttttccgctaggaaaattaccaaacctcagattcaaccagaatagcacaagaggaatagcatgggctccctgtcattcgttcacagtacattcgggagggagaagaacaatggtttgtaaaataggtccatacataatgcatgatgtcaataacactgggtagcttagtggctcacattgagtgaccttctcaatatattatttatgcctttcatgtttttttctagtataacatcttttttccctctggtcaagtattctattgctcatttattgtgttttaaccacaaatgtcttgccactatcagtcacatggctctaaatgaaatatagattataaaaggaaacacttcccacacattaaaaaaatgatttccagctggtcttaaaagtgtctgcagttccctctggacgtaagcatttatctgctaatgcttatcacttgggactttccctgctgtttcaaaagtgggaacgtggagattaaagccagtgttttaggagattagtacagttgtgtgccgcgtaataacattttggtcaaggatggactgcatgtattacggtggtcccataagattacaatactgtagttttactgtaccttttctgtgtttagatacgtttagatgggcaaatacttaccattgtgttacaatggcctacagtatacagaacagtaacgttttacacaggtttctagcctagaagcaatagctagaccctgtagtttaggtgtgtagtaggctacaccatctaggtttgtgtaagtacattctatgatgttcacacaacgacaacatctcctaatgacaatttctcagaatgtttccccatcgttaaaaaatgcatgattgtattgagaaacataaaattggatacaataaatatcacacttctataagaaggttttaagcactatacagtgaaattatgtctctcctccagaaaacaaacaaatctggccgggcgcggtggctcacacctgtaatcccagcactttgggaggccaaggcgggcagatcacgaggtcaggagatggagaccatcctggctaacacggtgcaaccccgtctctactaaaaatacaaaaaaaaaaaaaaattagcccggcgtggtggcaggcacctagtagtcccagctactcggtaggctgaggcaggagaatggcgtgaacccgggaggcggagcttgcagtgagccgaggtcgcgccactgcactccagcctgggtggcagagcgagactctgtctcaaaaaaaaaaaaaagaagaaaaacttaaaaaatacaacctttttaatgtgtcaggaaatacagagcttggtctgtctgtgatcaggaggaatgaagttgtgtattcagaatgataaagtataggtgtgtgtgatgaagtcccaagtgatctgtaaattcctgcagaggacctcacattgctgggtgaaatctttgtgggaaattggtaaaaagaaaaagacccagcaggtaccctagaaactctagacctaatacagattcccttctttattggtggctctgaaaatttttcacactgctgcaggtactttggccttggagacatcttactggggacttaacaatgagaaagacttagggattcatcacttccaggcaactgtaaggaaaagggagatccccgtgcctgaacttatagggttggataatcattttccttcctgttacacaacttggttttcctggctgtggtgctaggtttatagcagttacagggtttatttaaggcaatccaactttggacttcaataagataaatagtgatatctaaaagagacatagtgaagaaatcacactcaacatgacaaagcattgagataaaaagtaataaagtccagaaaaactcttcaaacagtaattttgcttctaaaaatcctttgactttgatgtgtccatcaatcataggcctatttttgcttcatttcatctgtctttggctaaaatgggtgggatgaggctttttggatagcagtagttggtttctcctattttctcttaatggacaaagaagcaagatttatgtctggaagacttgctgaaaagaacgaagtgacctcccagagccacctagtaccttagcaataatctcccagctgaaatcattgttgccttgatgagctacaaatcagggtggcatttcccaaacaggattcccccaaactcaagttgcttaaactgctaatattttcattctgttctgttttgttttagccattgtgtatggtcaaaaaaaaaaaagatatgaaaagtcctgggttaaacaaatttcaaggggttttttttttttttgcaggatatttcaaaatatttaatgttctaatgtgcattgcatgtcttggaattaaaggtgtgccgaaaacagtttgtgaaacattgaacattggagagaacctgtggggaagtggcccatgcttgggacatcagttgacttcttttttgtttgttttgagatggagtttcactcttgtcacccaggctggagtgcaatgcatgattttggctcactgcaacctccacctcctgggttcaagtgattcttccgccccagcctcctgagtagctgtgattacagggacccaccaccgtgcctggctaattttttgtatttttagtagagacaggatttctccatgttggtcaggctggtcttgaactcctgaccttaggcgatcactcgcctcagcctcccaaagcagttgacttcttggctgccaatggttaagcaatgccactggacagccccctgtgtgactgagggatagggatgaaaaaggcaggaaaaaaaggaagacaaagctgaaaaatacagaggaatacgtagaagaaaataaaaattcctgcttcataccaccccaaaataaccattttaaacctgcaatatgtttccttctagtcatcttactgtgtgtgtgtatgattatgctcatcatataaattaccctttttgttttttgagatgcagtctcgctctgtcacccaagctggagtacaatggcgcagctcactgcaacctccgtctccccgggttcaaacgattctcctgcctcagcctccctaatagctgggactacaggcgcccgccaccacgcccagctaatttttgtattttcagtagagacggggtttcaccacattggccagaatggtctccatctcttgacctcattatcctcccacctcggcctcccaaagtgctgggattacaggcatgagccactgcgcccggccaactatacatttttatatgataatcatactatgtataatttgacattttgtattttaagtttaatactttatatgtatgtacttgaaagcataaactaaatatagtacttccatatcattattttcctattaattgataattaggttattcccaactttagtataaaaataaaggacacataaatggcacactgaagaaatcaggttcataggaaataaacaaaaggcagccatatttttgtctttcaaaattttgactttaacaatgtatccagggaaggaaagtatttcccttaaccctgaaaacttgggcagtcccatgaatttctgaattacaaagttactttaagcttcattatctccactcagaaattaaaacgtctagtccaaaataagaagtcacattttaatcttcatttaaaggtatggctcttcccatccccaggtaggccagtggcaggttgtgtgtggtcagcttcttcttgtttccctcttcccctactcaatagctactgttgctgacctggggctgggcagggagagggatgagaggtaaggggatgagacggagaattcctacgtggttgtctcataagctgcggcagtctgcagctgcctccctgtcaggggtgcgctcccttgatggcagcattgatacagtctccttgggctggccgttgtcctgggggacccttgctttcctgcagtccactccgtacagactttctcagctgggttctatcgttgtcacccacgtggtcttgggtagggtccctttttaaaattattttattttattttatttttccagacggagtctcactctgtcacccaggctggagtgcagtggcaccatctctgctcactgcaagctctgtctcctggattcacgcgattctcctgcctcagcctctccagttgctaggactataagtgcacgccaccatgcccggctattttttgtatttttagtagagacagggttttgccatgttggccaggctggtctcgaactcctcacctcaagtgattcacccgccttggccttccaaattgctgagattacaggtgtgagctaccacacccggccaggtccctttgaataagaccccaggcagagcgttctcctagggagtctgcctctgattcctgggatgcacacaacttccatccactgtaccactgctcagacaaagccctctctcctgctgccagttaccactgctttctcagatgtgagtggtaccaatgcctgtgaccttcaacggcaaggggcacatatgagactttctgaatggtccctttaaatcctcctcttgggtcttgaagtgaagggggaagcactcctccccattttggtggggaagtgggacacagcacaatctctttctgagaagtcctcttcaaaaacccgtttttctcctctctctcagctcttttacatcttttttaaaaatctaatttaatttaattttaatttctgggatacatgtacgggacatgcagttttgttacatacgcaaacgtgtgccatggtggtttgctgcgcctatcaatctatcacctaagttttaagcaccacatgcattagctatttatcctgatgcccccctcccctccatactccctctgcaccttgacaggcccaagtgtgtgccttttatatcttcaatgtgagtcaggaatttaaaagagttaaagcaccaattttcagctgagtcctgtaaaaattttgcatttgacttatacctcctttggaatgcagcaacgattctatctttgtgcctcagttgaagtttcagttttaattcatgttacaaaaatatttgtatgtaaatctttgaatttctttcaggagggtagtttaccaaaccaggatggtttgccagaagggaaatcattggctcaaaggatttggaaagagtgttttcattctaaactcatggttgtttttctcacctagagacttacggggaaaggctgggccaattgggaatgaaacaggttgtaatgcagaagctagaccatgtgttaagtggtgctagggtaggtatcggaatttttccacgtacctataatttgcttacttgtttagtgccaatagtttgagattcttcacattttgtgaagttatactactaagcggccgggtgcaatggctctcacctgtaaacccagcagtttgggaggctgaggcaagtggatcacctaaggtcaggagttcgagaccagcctgaccaacatggtgaaaccccatctctactaaaaatacaaaaattagctggtgtggttgcaggcacctgtaatcccagctactcaggaggctgaggcaggagaattgcttgaactggggaggcggaggttgcagtgagctgagatcaagccattgcactccagcctgggcaacagagtgagactctgtctcaaaaaaacaaaacaaaacaaacaaacaaaaaacctaaccaattcccagtgcaggaatacttacaaagggaccaggcctgtgtttgtaatggaaataggagaatcttagatgtcattgattaatggagattttaacaagaatagctaatatttgataacgctgagcatgaaccaggctgtcatagctacattagcacatattaattcatgtgaaactcatatcaggcctgacgccgtggctcacgtctgtaatcccagcactttgggaggccaaggtgggcgggtcacgaggtcaagagatggagatcatcctgcccaacatggtgaaaccccgtctctactaaaaatacaaaaattagctgggcgtggtggcagacgcctgtagtcccagctactcgggaggctgaagcaggagaatcgcttgaaccagggaggtggaggttgcagtaagccaagatcacaccactgcactccagcctggtgacagagactctgtctcaaaaacaaacaaaacaaacaaacaaacaaacaaaaactcgcatgaactccatgaagaggcattattatttttatttatttatttactgtttttgagatggagtctctgtctaccgggctggagtgcagtggcacaatctcgctgtatctcccaggctggaatgcagtggcgcgatcttggttcactgcaacctccgcccccacccccgggttcaagcgattctcctgcctcagcctcccaaataactggattatacacgcctgccaccgcgcccgcctactttttttgtatttttagtagaggcgggtttcaccatcttggccaggctggtcttgaactcctgacctcatgatccacccgcctcagcctcccaaagtgttgggattacaggcatgagccaccgcgcctagcggaggcattattattcccattttacagatgaggaggctgaggtatggtgaagttaagggattaactcgtctaataagtggcacagctgaaagctgaacccaagcagttatctttgaatttctgctgcataatatgtgtctaaccattgctggttaaacaagatgtgttaaaccagatactgtttgttggaattgtcctcagaggttttgttaccttcccacaaaggagactgaaagcattttcagaaattaacctgatttccaggactgagtgtgcaaaagaggattttaatttagttgaatgggtaccagctccctccactggcatttgtttttcttcccttgatggggaagtgggacccacagcccagttgtgcatggtgcataacagatgcttagtaaaatgtcattgtatgactgagcgaatggtagagtccacatagctaaggactcaaatgtctgctttctgtatttctgttttctatgtcattattatctttacttatcatagcgacattaaaaggtagatatcgtcgggcgcggtgactcacgcctgtaatcccagcactgtgggaggctgaggcgggtggatcacaaggtcaggagttcaagaccaacctagctaagatggtgaaaccctgtccctactaaaaatacaaaaattagcccagcgtggtggcaggtgcctgtaatcccagctactcgggaggctgaggcaggagatcacttgaactcggggggtggagtgtgcagtgagccgagcgtgtgccactgcactccagcctgggcgaggtgacagagtaagactctgtctcaaaaaaaaaaaaaaaaaaaaagtagatattattggccgggcgtggtggcttacgcctgtaatcccagcactttgggaggccgaggtggggagatcatttgaggtcaggagttcgagaccagcctggccaacatagtgaaaccctgtctctactaaaaatactaaaaattagccgggcgtggtggcgggtgcctgtaatcccagctactggggaggctgaggcaggagaatcacttgaacctgggaggtggaggttgcagtgagtcaagatcgtgccactatactccagcctgggagacagtgcgagactccgtctcaaaaacaaacaaacaaacaaacaaaagtagatattattgcccttgtattacaaatgaagaagctgaagtttggagtaattatcttgtgcaaagtaattatcttgtgcaaagactatcttgtgcagaataagtatcctgtgcaaaataatattggactgtatcttgtgcaaagccagacagctactccaccacagatacaggttccagaccattgtcagtcatgcttgtctgttcacctaatgcagccacccatatcctgggactgttgcaagggtagaattaattattggcttatgaggccgggcatagtggctcacacctgtaatcccagcactttgggaggccgaggcaggtggatcacttgaggtcaggagttcgagaccagcctggccaacatggtgaaacccccgtctctactaaaaaaataaaacttagctgggcgcggtggcacgtgcctgtaatcccagctacttgggaggctgaggcaggagaactgcttgaacctgggaggcagaggttgcagtgagccgaaattgcaccactgcactctcatctgggtgacagagcaagactctatctcaaaaaaaaaaaaaaaaaaagtattgggtttggaatttccccttaaaataatccatttacaagacctagctagtttatcctcatttaaattcctcaaattcagtcttgctattaaaatatttccttgtgcctccaaactgattgctcacatccttttcattaaaattaaatcagaataatttctacataatttagaacactattggctttgttagaaaacccctgtgattgcatttttctcacatgacatcttttcgaattaattattccattctgttttaccccctttctgagcacaagcccagcagctctcctctgtgaggaacctgggaagagtttcttcctcatgcctcctgaggatgaagttgcctcacctccagcattgcaagaatcaatactttgacctcgcatgagagaacctgagtcctcgtgctatgctgctcctcactagagccgggaagtattttaactgctcttgaccccaattttctcctacatgaatgaagagctataactaggtcagggaaagtgttaggtatgcccagggcagacatcactaatcacttcagggattcctccctgctgactgtcaatgcaaatttccaagcaggttccatgtatccactggaagtggcatctaatgtgaaagctggttgctgtctttggcaaatatgaatgttcagctcccacacaggcctggggccccatttgtggggcctggggaaacagtacaaatggaggccacatgctgtatgtcaaaatatttaaaagttataaatcaagggactcaaagagacacccacgtccattgcagcattatttgcaatagccaaaaggtggaagcaacccaagtgtatatccatgaatgaatggataaaccaaagatttatatacacaatggaatattatattcagctggaaagaggaaggaagttctgatacaagctacaacatcagtgtaccttgcggacattatgctaagtgaaataagccagtcacaaaaggacaaatactgtatgattccttatatgaggtacctagaatagtcaaattcttagagacaaaaagtagaatggtgattaccaagggctaagggtggggagaagggaatgaggaattagaatttgtgtgtgtgtgtgtgtgtatgtgttttgagatagggtctcactgtgtcacccaggctggagtgtagtgacgctatcatagcttactgcagccttgaactcctcccgcctcccaagtagctgagactacaggtatgagctactatgactgccaggaagttattgtttaatgggcagagggtttcagttttataaaatgaaaagagttctgtgggcagatgatggtgatggtaccacagcaatgtgagtgcacttaatgccactgaactgtagacttaaaaatggttgacagaacattttgtgttacgtatattttaccacaatttaaaaaaacaaaacaaaacaaattagtgctatcctcaaagacctggcaacctaaaatcctatactttgctaagcaaccattaaagaaaagaagccaaaacaaagattttttttttaccaaaatagttataaatccatctaacaaaatgttaaatgatacatgttttactctcctactttgaaaaacatagcttcgtaataacctggaactctactctttagtgttccatattggaattccatgttggagttcatgttggaacacggcagcatgcggagaaacagcctctggccatggcttaaccccttttcttcttggacctggctgcagcccctgctacaagggacctctttgcaagcatgtggttacccccacttgcatataaagctcggctcacacttctgtaaacagctgcctccagccactctttaggcctagatgtgagcaccctgatggtgcagtccaccctcaggatttaggcaagaggactataaaagccttgaaagtcttggggccatttgggcagagtatactggagtcatggttggtacataggccctgcggatgcttcaccctgtgagaaggggcatagctgagaaagggccagagtggcttctctaaagcataaggtttttctggccttgattgttcttcctcctctagatactatcaatagcgaatccattcttttcaccactggtcatttatgactacctacatgttggttatcaccatacttccatccacgaaactcaagggaatagactattagtttcacgaaggagagaagggttaacagtgtcaaatgcagcagagaagtccaggaagctaaggactgagaaatgtgcactgagactggaaactggatgttattagtggcatttttttgttttcgagacacagtttcactctgttgtccaggctggagtgcagtggcacgatcttggctcactgcaacctctgcctcccgggttcaagtgattctcgtgctcagcctcctgagtagctaggactacaggcatgcaccaccacagctggctaatttttgtatttttatcagagatggggtttcaccatgttggccagactggtctcgagctcctgacctcaggtaatttgccagcctcggcctctcaaagtgctggtattataggcgtgagcccccaggcccggccattaatgacatttgatgaaacagattcctagtgaagagggttgaagggtgatgagaagtgaggaagtggaggtagagagtgaggagtgtaatgactttttctctcttttttttttttctgggacaggtcacactttgtcgcccacgctggagtgcagtgctgtgattatggcttactgcagcctcaacttctggggctcaagtgatcttcccacctcaggactgcccctcactgcgagtagctgggactacaggtgcatgccaccatgtcccactaattttttttttttaatttttttgtagagtcaggggtctcagtatgttgcctaggctgttctcaaactcttgggctcaagtgatccacctgcctcggcctcccaaagtgctgggattacaagcatgagccactgcactcggccctttagtgacttttcaaaaagtttagctgagaaaggagagcaagagaaagggcagtagctagagttggatttagggtcaagctttttttttttttttttttttaatggaaagcaagagtaagggcagtagctagagtgggatttagggtcaagctttttttttttttttttttttttaatggagtcatcagagaatatttataggctgagagaagaagctactggagaggggctgggtgcggtggcccacgactctaatcccagcattttgggaggccgaagcaggtagatcacaaggtcaggagatggagaccaccctggccaaaatggtgaaaccccatctctactaaaaatacaaaaagtagctgggcgtggtggcatgtgcctgtagtcccagctactcgggaggctgaggcgggagaattgcttgaacccaggaggaagaagttgcagtgagccaagattgcaccactgcactccagcctggtgacagagcgatactctatctcaaaaaaaaaaaaaaaaaaaaaaaaaaaaaaaacagagaaaaagaagctactggagagggaaaaacaagacgtttgataggggataattgatggtacacgtggaggactggggtcaacagcacaggtggagggcttggccttgaaccagagttgaaatgattcactttctgaagctagagatggtgacaaatacgggcaagtttgtaattgggatgttgaggcagattgtgattgctttaattttcttttttttttttttgagacggagtctcactctgttgcccgggctggagtgccgtggcaccatctcagctcactgcaacctccgcctcctgggttcaagcaattctcctgcctcagcctccagagtagctgggtctacaggtgcacgccgccatgcctggctaattttttgtattttagtagagacggggtttcactgtgttgcccaggctggtctgaaactccaaagctcaggcaatccgcccaccttggcctcccaaaatgctaggattacaggtgtgagccactgtgcccggctaattttctttttaaataaagagataaaaccacatgctgagaacgaaggaagaaaaatatgaacttcagcagagaattaaaattttggattaactgcttaggagaatgggggaggttgctgatcaaggcagttaaaataattgtcgactggcacaaggacaaagctgagtttgttgaacatgaacattaagtggcaaaattctgcagggttgtgtgattgatttctggaagttagcaccccccggtcgtgggcagaggaaatcggttgtagaaatgaccccgggtgggagtttggtgctcgtgtgcaaagtagttagaggtacaaatgggcaagggagtgaggtatccaggtaacatggtagagcaggtgatccgccatagactgtaggcctggaggctgatggaggcagaagcgatgccggcaaggggttgatctactctgctaagttggagaagttaaggaagagcatgtgtaactggagtgggtatatgagagaaccggatggaaaggagaatcctggctattggtgctcaagatttcagagatgaagcagttaattagctagactgagatgtaggataagaaggtcctgggtgaggctatcggagtgagtgacttaggcagaatggaagttgcagattagcatcgaggaactcatggaaattggatgccaaggttggtttggttttacatattgtagttaaaggataacaaggcttgacgaaaagaggaaacctgataacaccatataaaaccctctccttatttaagacatgggccctatggacatggaatccactccacatttctccacgttttctttctttcttttctttttgaaatggagttttgctcttgttgcccaggctggagtgcaatggtgtgatcttggctctctgcaacctccacctcctgagttcaagcgattctcctgcctcagcctcccaagtagctgggattacaggtatgcgccaccatgcctggctaattttgtatttttagtagagatggggtttctccatgttggtcaggctggtctcaaactcccgacctcaggtgatccgcctgccttggcctcctaaagtgctggattaagtgtgagccactgcgcccggccccacattttctttttacttttatttgttttgagatgaaattttgctcttgttgcctaggctggagagcaatggtgcgatctcggctcactgcaacctctgcctcctgggttcaagcaactctcctgcctcagcctccgaagtagctgcgattacaggtgtccatcaccgtgcccagctaactttgtattttttttagtagagacagggtttcaccatgttggtcaggctggtctcgaactcctggtctcagatgatccacctgcctcagcctcccaaaatgctgggattacaggcgtgagccctcgcacccagccccacattttcgtttttatcacttacaagctcctgatcagttcatcaaggactttaaaaactctcatactaaggcacagaagtaataggttgaaatcaacatggatatgagggaaatgcagatctagcttttaagtagaggggtatgaacagcctcccttgagagagtatctcagggagagccagatcctccaaggaggactaggtctcagttaaggcctgaaaaggaagggagtgctgcatgagaaaccggaaagaccttattgcccttgaagaggagtttcagaggatggtggaaacgtgggagaaggtggagaggtcaagagtgatcagagcaaggagtggaagtctagatttagagttgaggaggacatggaaatttgatgcttaggctagttagattttataaatggtaactaaaagataatacaaggcctgaagaaaagaggaagcccgataacaccatctaaaaccctctccttagttaaggcacaaaccctctgggaatactatccagctactttttcaatgttatcatttacggaggaagtagagtatcatggagataaggggatgaaagttctgggggagaagaacgaattgagaggattatacgttggctgctccccaaggctagcagggatgcatgcagtttccagatgggacagtgtgcttggtcatatccctcaggacctggccaggtggggaaagctgtgctggtgggtcccacacaggctcagcagcttgaggatgttgaatctcagaagactgagctttggccgggcgcagtggctcacgcctgtaatcccagcactttgagaggctgaggcgggcagatcacccgaggtcgggagtttgagaccaccctggccatgatggtgaaccccgtctctactgaaaatacaaaaattagctgggtgtggtggtgcacacctgtaatcccagctacgtgggaagctgaggcatgagaatggcttgaagtcagcagatggaggttgcagtgggccgagattgtgccactgcaatccagcctagatgacagagcaagactgtctcagaaaaaaaaaaaaaaaaaaaaaaggccgggcgcggtggctcacgcctgtaatcccagcactttgggaggctgaggcgggaggatcacgaggtcaggagatcaagaccatcctggctaacacggtgaaaccccgtctctactaaaaatacaaaaaaattagccgggcgtggtggcaggcgcctgtagtcccagctactcgggaggctgaggcaggagaatggcgtgaacctgggaggcggagcctgcagtgagctaagatcgcgccactgcactccagcctgggcgacagagcgagactctgtctcaaaaataataataataataaaaggagcctaagctttaagaggttagtccatttaactaggattagggtttagggtggcagtggggctaggggaagagggtgagagggaggaagcaaggtaattcacgtttgttaaagctctgtgttaggcatttcacatacgctcttttaattctcacaataatcctacaaaggaagcatcattatcctcagtttataaatgatgtgtcaacttgcctgtaacataatgcgaatttctatatgaatgcagatttttcttcccaaatgctgaaagtagacaattcgtaaatggaaaataaaaaaagagtaataaaaaaaggcaagtcaataagcatatagccttcataactgcctttagtttttagataatattttattgtacctttcatgtctcctttgtttaatcttggctcagggcctatctgttttatcattcgacaggattcaaagtgctatttctaatcttcaccggtaaaaatattcaaatcatatgctttaaagagtattcaagtcatattcgcttcagattgcctctctagggagacagctctgatacaatggaagtactggattgaggatcagagccatggattctggttctggtctttgattaattatttgaagctggcaaggcactcaactccacaagtttcctgtgtctgaaacagggatcattacatctgcattgttgtaggattgatgtgtaggtgaaagggctgtaaaatgctatgcagatggcaaggattggtgttcttgaggcagagaattcagaaccacaaaacctttattgaaaacctttggggacaaatgtgttttagagtgtcccagatttttttctgactttagaaaggaagaagagaggccgggtgcagtggctcacgcctgtaatcccagcactttgggaagctgaggcaggcagatcacttgaggtcaggagttcgataccagcctggccaacatgatgaagcccctgtctccactaaaaatacaaaaaattagctgggtgtggtggcaggtgcacgtaatccctgctactcgggaggctgaggcaggagaatcgcttgaacccaggaggtggatgttgtagtgagccaatatcacaccactgcactccagcctgggtgacagagcaagactatctcagaaaaaaaaagaaacgaagaagagtgcccatgttgcatattactcaacactcccgttaaagtctggagcagcaccctgtaatcccacacgagtatttctttagcaagacatgattattcacattaagagggtttgataaaaatcataaatagccttattcatgtaggctaaataatgggcacctatagatctcaagtcttaatccctggaacctgtaaatgttacctaattaggaaaaatagtctttgcatatgtgattgagctaaggagtttgacgtgtgagattatcccaaattgtctgagtaggccctaaaggtcctcacacataaccttgtaagagaaaggcagagggaggtttgatacacatggaagagaaaaaatgatgttactttggaggcagacagattggagtgacatggccacaagtcaaggaatgctggcagctaccagaagctggaagtggtaaggaccagattcccccaccccctggggcctcaggtgtgggtgtggccctgccaacccattgattttgactcagtgaaattgattttggacttctggtctccagaactataagagaacatacttctatcattttaagctatgaagttagtggtaatttgttatggcagccacaggaaacaaatatagtcaggttttgctgccaaatgggcaatgaaaaaaaaaaaggtgagttttcagatttcatacacctatatttaggactgatatccaagtacttttaaaagcggttgttgtgatatcttgttcattcatagcccttcagaatggcaggcatgggcctggaactgctgctagccttgctcactgtggcggtgagatgggtgttgaggcatgttgaagatataagggcagatgggcctatccaatagagaagtttgagctgagagagcagaatgttttacctaagggcaatatctagccttagtgattcaagcagtagctgggcatccccacaggtaggtgactctcaagagcctagataaataagcacaggtaagggtgtctgggtatcagatatcaggtgaggttcagggcaagggctaggatatcggggatcatggtagcagacaggttactgctacagtctgaatgtatgtgtctctccaaaattcttatgttagaacttaaaccccaaagtaatagtattaagaggtagggcctttaggaggtagttaggccagaagggctccaccctcagggatgggattaatatccttataaaagaaggctccagagttgcctggtccttcaatctcttctgtcatgtgaggatacagtgttcatccctttttgtccctttctaccgtataaggacatagcagtaaggtacaatcttggaagcagagacagagccctcagcagacaccgaatctgccaacaccttgattttggacttcccagccagcagaactgtgagaaaaaaatttctgttgtttataaattactcaatctaaggtattttgttatagcagcacaaatggactaagacagttactataatagaaatggaaaaaataggaactgatacagaagcccaggtggatgaatgtgtgtgtgggggtgggggtgtgtgtctgtacaggccaggacatttggatgacaaagtttctttattagagaatatcttggggtgggaatgatgacttaggtagaatgtgggcttttccaggatctcgaactacactagcagcaagaaaaactcaaatgaaccccagaggggagtgacttggggagcaaagcaggagcctggaccagctctgaagtgcttgccatgggccaggacaagaaggagacatggccaattctcagcctgaggaggggatgctgaggctccagagcctgttgcttcatgctcagcttgaccaagaaactggggtaagtagggtatgaggtgggaagataagtgggtccagcaatagagagccacaggccaacagagggaaaatctttgggggcattggcggtggggggagagaggacctgctgacattgtcaaagtctttgtctttctagtttgttttaaagtcaacttcctgatgataaaacggtcctcgtatcatgaggcaactgtcagtctatgatgaaattacttaaaatctccaattaaaaactcattacgtttatctgaaggctattttaaaagttatgagctaatctaaatggccaacacaagacttggttaaataaactatgggcatctatgcgaccaaatgttttatagccaatacaattatgtttatagagagtttctaaaggcctaggaaaatgtttatgctataatgctgtgttaaaaaggcaggatacaagattgtttatagactaccaagagaccaaataaaaactatgcatgaaaaacaatctagtagaaaatccaccaaaatattaatatagtgatagcctctagagagtgagactaagagtattttttctttttttttgggacggagtcttgctctgtcacccgggctggagtgcagtggcacgatctcggctcactgcaagctccgcctcccgggttcacgccattctcctgcctcagcctccccagtagctgggactacaggcgtccaccaccaagcccggcttatttttgtatttttagtagagatggggtttcaccgtggtctcgatctcctgacctcgtgatccgcccgcctcggcctcccaaagtgttgggattacaggcgtgagacaccacgcccggccaactaagagtatttttaaatcatctttctacttttctatttttcaaattatctgtgcatcacattttcttgtagttgttttcctgttttatatacattacttttgtcacgggaaggacccaagaaattctcctttctgtaaaagctcacaccttactttttacaaataatctgaattcaaagccttttgtgtttcaaagggcaatgatatctacaaagaaagggtattgcattaacatttctgattatatgaactctagatacaaaaggcaaaaaataaacagattctccccccaaaaatcaagcctcaggagaaatgatcttattttttttcttttcccataagatccaactggcaagaaacttcaggctgtggaaaagcactagacagtcataatatggtgcaacatggctttaatgatgtcatttaaaccctctcactgcaggaagaggctgctttagtgatgagtgtggcagaggaggagctgtctcatactagcctgcggatttcctttatggagtaaatcctttaagattcttctcaagagctgggcgcagtgtcttatgcctgtaatcccagcactttgggaggccaaggtgggccttcgagaccagcctgaccaaccaggagaaaccccgtctctactaaaaatacaaaattagccaggcgtggttgtgcatgcctgtaatcccagctactcaggaggctgaggcaggagaattgcttgaacccgggaggcagaggttgcagtgagctgagatagcgccactgcactctagcctgggcaacaagagcgaaactccgtctcaagaaaaaaaaaaaaagactcttctcagatattatctcttctatgatgtctttcctttaccctgagctggaataaatgcccttgtttcctcagtacccggtgcaggcctccttccctggccttatcatatgacataatctcaccacgaggctgtaagagtctcagagtggcagcaacagtgttttatttacggtgctcttcacagcacctagcagaactggcagattgtgggtgctgaataaatgtttgttaaatgagctgagtaattctcccaaagtgtgagagaaattgtattcgttttctaaggctgccataacaaagtactgcaaactgggtgacttaagaaaaatgtattctctcacaattatggaagctaggagtcttaaatcgaggtgttggcaaggttggttcctgctggagggctctgatgggggcagggctgttccatgcttctctcagcttctgggtgcaatcccacatgctccttgactttcagcggtatcatccaacctcttcttgcatcttcacatggtgtctcctctgtgtctctgggtccctgtgtccaagtgttccttatttttttttgagacagtcttgctctgttgcccaggctggagtgcagtggcaccatcttggctcactgcaacctccgcatccagggttcaagcgattcttgtgcctcagcctcccgagtagctgggattacaggcatgtgccgccatgcccggctaatttttgtatttttagtagagatggggtttcaccatgttggtcaggctggtgtcaaactcctgacctcgtgatctgcccgcctcggcctcccaaagtgctgggattacaggcgtgagccactgcgcctggcctgttcccctttttataaggacatcagttacactgggtttagggcccaccctaatccagtttgaccttaactcagttacattcacaaagaccctattaccaaaaatgtcacatttacagatactgggattaggacttgaatgtatttttatttaactcacaacagaaactatagctatagctagctagatagtatatagtagagtacagatactcagtgaagtggtaataaccagctgatgtacccagtataatatatggactctgcagcgagtataagatcatttctccagaggcttgatttttttgggggagaatctgtttatctttttgccctttgtatctagagttcatatatttggaagtgttaatgcaataacatttttctttgtagatatcattgccctttgaaacacaaagtgctttgaatcagattaattttgagaaagttgggtgtgagctttttcaaagagtttcttgagtccttcacacgaaaagagtaatatatataaaacaggaaaactactaagagaaaaagtgggcagggcacggtggctcatgcctgtaatcctagcactttgggaggccgaggtgggtggatgacctgaggtcaggagttcgagaccagcctgaccaacagggtgaaaccctgtctctactaaaaatacaaaaattatctgggtgtggtggcgtgtgcctgtagtcccagctactagggaggctgaagcaggagaatcacttgaacttgggaggcggaggttgcagtgagccaagattgtgccattgcattccagcattacagcctgggcgacagagtgaaactctgtctcaaaaaaaaaaaaaaagaaaagaaaaagaaaaagtgatgcacagataattttgaaaaatggaaaagtagaaagatgactaaaaagatactcttagtctcaccctctagaggctatcactatattaatattttgatggattttctactaggttatttttcatgcatagttttacttttgtttgtttgtttgtactctataaacaatctcataaactgcctttctcacagagcattatcacatactgggcagactgggcacctgagacacagtcctgggtaaccaggagcagaagactggttcaatatgaaatccataaggcgcagctgagcgggaatttggagagccaagcaagtggatactaaaaacaaggaaggaagaaatgaaatttcagaaattgggcaatgttgccaagagtggggagattggaatttgggtttaatggaggaaaagaacagtttgctgaagtccacccaaagacttttcctaggctgtttaaccactgcacatgtgtgttggtctttggcccatgatatttgcttagcatctgaccctagatacatatacatcagggatttggcaccaaatgaggcgtgtaaggaaaaagcagaggatttttctcctaggaaccataaaagaaaaacaaatgtgttggctctatgtactataacaggatgtgagggaaacacattgaactctatattctacagttgttctaattgtgcattttactttctgacaaatagagcctctaagaattggtagcatatttggcagagattaaactctaggttgggcgctgtggcgcacacctgtagtcccagaactttgaggggccaaggtgggcggatcacttgaggcaaggagttcaagaccagcctggccaacacagcaaaaccctgtccctactaaaaatacaaaaaattacccagacgtggttgtgcatgcctgtagtcccagctactcaggaggctgaggcacaagaattgcttgaacccagaaggtggaggttgcagtgagccgagaccgtgccactgcactccagacaggcaagactgtctcaaaacaacaacaacaacaacaacaacaacaacaacaacaacaacaacaacgagattaagttctaatatatggccatatggtaaattttatattcatattcaacatactactctgagatttgaagagcaaaaggcatgctgttgtttttctttgaaaacagaatttaaaaaaatatttattactcattggaaagagtaattaataacatcaaaatgggaaatatctcagtaaataaatgccctaaggtggaatagttcctataagctattcctttgtgagagcaatttttcctaaaatctcaaaggaactggccactgcttaatctgagagggaggcaggacagaaccttaacatttctgtggtaagacacttaagcccttatagttgcaatcccttactctaagttacttgtccgagaatatctaagcttatgcaaattttagactgaatatcagaaggcaaatggaaaaattaatgagttgaaatgctcttgctttgattaggaccatgacatttgagtttagtttagttgaagtaaacatattaacaagccaaggagaaagataaggaggagacaacacgtgagaaggctgaaccaatcaaagcaggagacccaggatgtggatgtatgaaaattccagggaagactgtttacctcccagactccagaacaggagattggaatttgcaaaggcaaaaaagatgagaactgggctttatcaagcaaccatagttttcagttgcttcatgcatgccttgggtctgttttgataaccagcatatcttttgtaacccaggcaagaaggaaaaatatgtgtcctactgaaggggctggactagattgtgagatgggctctgagcattccagcctcaaagataattaagactcaagaagttttcttcttgagcaagagttcaggaaaagtttatactgacttcacaactggctctgaccaaaagtttcagtgcccttttgttggaagtattaacttacttgacccctagtttgtacataaaactggctaaagagaaaggaggcaacatgaaaatggattttaaaaatccggttttgaactatgcctggcatgctaaaatatttaattcttcaacacttggcatttagagaagagggtggatttaaacagaccagctggctaattacactttgccaacattcctactggctgcttactgggtgagtcctgtttatgtcaaagtctaactctgtcctttatcccttatcatggccaagaaatggaatcccatgcattttacttaatatgaaatgttctggtgaaacccaaagcaacaaaggccactttactttcttggtgagctggacaaggcaggtggtacttgaaggttgtggagaagtctccggacaggcttaaagttatgaacaactaagattccagcttaccaccctccccacctccttttatttatttatttagagacaagatcttgctctgtcacccaggctggagtactgggttgtgctcctagctcactgcagcctcgaaatcctggcctcaaatgatcctcctgccctagcctcccaaagtgcaaggccaacctcattttagtgaagataatttttttatccttaattaagatattgtgaagcctgggcacagtggctcatgcttgtaattccagcactttgggaggccgaggtgggcagatcccttgggcccaggattaggagattagcctaggtaatatagtgaaccccatctctacaaaaaatacaaaaatgaggcaaatgagccgtgtgtggtggtgtgcacctgtagatccagctacttgggaggctgaggtgggaggatcactccagtgtaaagacattttaattaaataaatttttgaaaagtaaagacactgtgctgaccagacaaaacgcatccgtgagctgtattttgctttaagggctaccaatttgtgcctgctatctagtgacagctcataattgaaggtctgaatttttgggctccacttaatttgttaaaagtggcttgcaaaactcctttataggagaggaaacgattgtccaaatcttctgcatgttctaaaattaggtaaaaacatttttcctataacttttctagtgccattaaatgaagtgtccttggaaggaagatgttcatcttggaaattgctaggtgagggttgcccttcactttctcaatgaatagctagcagtaaatactcagggtccccctccatcgcccccactccaatcttaggggttatcagcacaccactctggaccactccttaatcccaggcgtactgggctctgctatgtacttccaaaatcccagtggcaccataaaggaagcaagccatcattacagtgacttttaagtcagttttgtgaataaggccggaagtttttgttgatgagaaagagagattactgtgttgctttgtataaataaataaaaataaattcctcttaaggtgggtgctcctatggggagaagtttgaatgggtatgatttacagtagggatagtaatatttagacaaggatagaactatggcttttaaaatcctctaaggctctagagccttatttttagaccccttatctgagaatttctgagaatttctctctaaactcctcaataaggatattactaaaaaatagctttaatacatagcatatattcctaagcacatctgtgcaaacctttcctctggctagaccacagccttcaggatcttctgctacagttagacataaatatccatgctccaggctgccacagcaaaaatgacaccagcaaacagttaccaaccacttatggtatatctagtactgtgtatataaaaagtgaaatagaaatatgtatcagctggatgatacaaagaagagggctatcagactagctggagtaaagggttagaaaagtgggttggagatagactatagggagttttgcaagctagactgaggagttcagacattttcctggaggtagggagccattgaaagtttttgagcagggaagtgaaatgatggaagaggcttttggaaggcttaaccaggcagacatctgcaagatggttcagaagggggacagactagaggcttggaaatcaataataataataaattcaagcataaaatcatctaaagacttacagtgacaataggatactgagttacagcgaagaatagctaacattaactgcatgctgtccatattgttgtgagtgctttatatgcactagttaatattttcaacaacatgcagaggtggatgatagtaaaatcactctttttcatataaggaaactgaggcttagagctgtgaaaacacttgctcactattaactggctaagaagtatcagagctggaattcaaacccaggtagtctgcctttagggcctttgccttcaaccaagctctacaatgccttttagctacttgtagccaagcgtctcagaccctggccctcccctgccattgtggtaaggctgggacccagcctgggactgttatcaccctgcctcattgtctattttgtttgttgacagacctcttcctcaaatagcatcctcgccaaggtgttaacttcaagaaactcaaaacacttgccaaggcttgcatctatttcaaaggaaacttgtgagcaaagaaggggaaaagatgagacataaatactgtgcaaatatccctcatgactgctcaccacattctagtagaagaaggaaggaaattcaggtctttctgccctgttgcttgccattggacattaatgatgttacccgcctggcctcactggccttggttcagtggttttaggatgcatttacttcccaaatgggagagttggagctcatgtaattttaaattgttcagtgttttactggcatccttttgtcaccattggatggagaggatttattgtgaactcaaactgactacatgtttttttcaaagctaccgtgaaagttcccaaacattttgagcctgtagatcatccaggcatatacaatcttataagaataaaaccaagatgtttaccattgatttattttattttattttatttattttgagacagagtcttgctctgtcacccaggctggagtgcagtggtgtgatcttggctcactgtaacctccgcctcccagcttcaagcgatgctcgtgactcagcctcccaagtagctgtgactacagccatgagccaccacacccggctaatttttgtatttttgagtaaagatgaggtttcaccatgttggccaggctggtcccaaacccctgacctcaagtgatctgccccccttggcctcccaaagtgctgggattacaggtgtgagccaccatacccggcctgacattgaaattttttaaaaaacatttgttctcacaaattaaaagcctgacatagagtcaaccagaaggtgacctaattaaattatgtttaaattaaggtaattccatacaggttgcatggaataatttatttttataattatgacattttcctgtataaagatagctatgaacttagagaacattaattttggctaggactctaaaatatgtttactctttttatacttcctaataatgctgcagtgttagaggaattctattgtaggaaaacagagaatactttaattgtagacctaaactatttataaattattgtcgtcatctcatacaatggaggagcttaacacacacgtatttgatttgacaccaatttcagcaaaacatttattgaggttgtgcacataactaaatccatgtggtgaggttttattgctaggttgcattctctgtgctgagttatatcaacaatactttgtttactgttttagcaggatgacctctgcactagtcagaggtcaggcctagctacattctactgcatcagcacatcaacctattgattaattgttgagtctttttttaagtttaaacttcggccaggcagtgattgaaatggatttatttttgcaagtaagcagattacagaggcaagcaaccttagaaggactattgagaaatcatgaaataattttgtttggaaagttaaacaaatgtctttatttcataagataaacatctaaatcagagtgggtgcacatgcagttctctagttgtcaacatttaaatacgcattggtagacttgtcaattttctataaaagtatgttactgagatctgtaatgtcaaggatgatttttttttttagacggagtctcactgcaacgcccaggctggagtgcaatggtgcgatctcagctcactacaacctccacctcccgggttcaagtgattctcctgcctcagcctcctgagcagctgggattacaggcgtgtgccacaatggctggctgatttttgtatttttagtagagatggggtttcaccattattggccaggctggtctctaactcctgacctcaagtgatccacctgcctcagcctcctaaagtgctgggattacaggcatgagccaccatgcctggccaacatcaaggatattaaactcatgaaactagtttaaaaaattttaagtaatccctgtttgatttagtatgggtctcattttagtcagaattggtattaaaaagtaggactttttttttttttaacagtagagaaagttcatcaaatccttgaggaaaagtttaacatttaggtcactcttctaataatactgagtttgtagaactgatattgattgagaactaagaattctgtttcttcttaggagttttaaaaattgatttcagagaatcaatttttaaaagtcaaccttccccaaatccacatttcttattaaattttactttatgttattttactgtattttccttaattttttaccttcagaattgagggctttttttccatttaaacaataaaattcattaaaatggtttttgggctgatgaaatcttaaaaacaatctgtttcttaaaaattttagacccatgttgtatacaaacatcttgtaataaaagactcaatgataatgtatgaaagagcccctcaccaccttcccatccccatgatacctccagctgcagtactgtgctcagctctcatcctgaggagcttacacacacacagctctctattaacatgtggacaaattactttccagttccctcctccccaacatttctatttcattttcataacattcattttttgataaacttgtaacagactttatatgataaataatggttgaaacagctgggcgtgttggctcatgcctgtaatcccagaactttgggaggccgaggcaggtggatcacctgaggtcaggagttggataccagcctggtcaacagggtgaaaccccatatctattaaaaaaatacaaaaattagctggatttggtggcaggtgcttgtaatcccagctactcaggaggctgaggtagcagaatcgtttgaaccggggaggcggaggttgcagtaaaccaagatcacgccactgcactccagcctgggtgacagagcaagactcggtctcaaaaaaacaaaaacaaaagcaaaaaaactgttgaagcaactgattaaacaaatatgtctcattagggaatcttttatctggccgtgttactcttgtccactgttgggtaactctttgtctgtgtccaggagaatctagagatgcattctgtctacactctgtcaggaccataaacaatttatttctgtcccatattattacttctatgatcaagaagaagagcgttctggacagccttacagagagggtcacctgaaacagattttgatgactttcaaccattcctttcctgtctgtcttgccttctcttctccctctcttttactttcactcttttctttttctttttcttgtgtttgttaggaatgcatgattgttgttcattttagggttaaaccagaatctgttttagtcagggttctccagagagacagaatcaattatacgtgtgtgtgtgtgtgtgtatgtatgtatgcatgtatatgtgtatatatatatatatatatatatatatatatatatatgattataaaatgtctttaattatatataatgcctctatatattattatatataacatatttgtattatatatatatattttgcattggtaactatgaattttattatgtggacatctactgtggcatgcatctgtacaaacctttcaggccgtggtccacagctgggttatgaataaaaaggcatacatttttctctcattttattgcaatgaagtttaccggtacagaaaagtcacatgacattggtgggtcagatttcttaaaacctgcaacatgaggaactctaaatacagtaaatattgttacacattcagacttccaatgtacaagtacttggaaacagttacacccctcaccaagctagattggggacttgaagtccaacagcatctgaaatgctgtgaaggcataactttacaaaagagcaatgtaaggttacagaacttgcctttattaaagtgatatgttcatgttattccagcaccttcacaatttaatgaaccaaatttactatacttcacttctacaaacctagatgaaacatgaaaacgaagccacacagtataaattgcaacttcaggaaaagctcctgctttattattccacataatttttcccatgtaaaatcaacgtccaatagttcctggtatgtgggaagataatatttgttaaagtcacaatgaagccttattgatggaagcttggatatataaacagcacaagttaggccgggcgcggtggctcacgcctgtaatcccagcactttgggaggccgaggcgggcagatcacgaggtcaggagatcaagaccatcctggctaacacggtgaaaccccatgtctactaaatatacaaaaaattagctgggtgtggtggcgggcgcctgtggtcccagctactctggaggctgaggcaggagaatggcgtgaacttgggaggcggagcttgcagtgagccaagatcgcgccactgcactccagcctgggcgacagagcgagactccatctcaaaaaaaaaaaaaaaaaaaaaaaaaataataataataataaataaataaataaacagcacaagttgagaaaaggtttaatctccaaacctattagactggatgaggtaagatcagtactggccaccttgcagcattacaggaggtctcattcccattggaggtcgaggaggcccactctggtaagggggcactgttggcggtccctgcccatatggggggatagcaccaggaaggtatgctggcatggcttgatgatgaccaccatactgaccatgaggcggcactggggggtctcactccttgttgctgtgggatgcctggctatggtggcgtcatacttccaattggttcaactggtggattaccaatgggggcctctccttgcagaggaagattatgttgatctctaggtaaccgtgcccttctgtcttccagatatataccctcatctggatggatcaacttactggttgcattggttgttacaagtgtagcaggcttacttgttattgaagctgctggtttagctgcagtactatttgttgtactagtggttgaatctgcagactgtgtataagcagagaacataggctttggggatgctgtagttgcttcaggggtactatttaagggtttgaaatctgtaccaacaggtccttggacagctgcctgagcctgtccagcactggagaaaagaggcttcgtaactggaggctgtggagcaggtacagttgctgttggtgcaggtggtctgttaagaatacctggtgctgaaacagcctgtgtttgggtcactggaggattctaggatgtggaatgggggtcggggagtggaggggatacctggtgacattccaggcatcagaggtggtattcctggtccaggtggtgtattcctggtccaggtggtgtattcctggtccaggtggtatattccacccattggcatcattatgttttcaccgaaaaatgactgggtgcattttctttgatgatgcaatccaggtggcatggctggcataactggtggcattcctggcatcagaggaggaacacctggcattaatggagctatgcctagaggcattcctggtgctcctggtactggcggcagtcctggctgtgccactggaggaatataaccttgttgaagttgaacaggttgtgggtgaaatgaagttgagcctgcagagtcgtcgtcatcgtattcatcagaatcatcttgttccttctttttttgactttcttgtgttttctgttcaagaacttgtcgtccttcatccatgtctttttctggaataccttccataccatatatttccaattctatgtctgttatcccaggtattgcatttggtacagcatctattatttctttatgcacctgcatgcaatgaatggctaagccaggtcctggatacaatttcttgtgacatatatgacatttaaaatgctttgctttttggtgctgtataaggatcttctcatcaccaaaatctctattacaataccagcaccacggcttccgctgcttcttcttcttgccccataactgcgctctaccaacaaaataaaagggaggagaaaagaagcaagagaaacaaggcaaaaaatcactcacgttcccaaccaaatggttaccactgcgtcccacaggaagcagacataaaatgctatattatattataaatatatacttataagtatatttatgagtgtttataagtattataagtatattataaatatattttatttatttatttatttatttgagatggagtcttgctctgttgcacaggctggagtgcagtggcctgatctcagctcactgcaacctccgtctcctaggttcagcacttctcctgcctcagccttccgagtagctgggaccacagacgcatgccaccacgcttggctaatttttgtatttttagtagagacagggtttcaccatgtcggccaggctggtctcaaactcctgacctcgtgatccacccgcctcggcctcttaaagttctgggattacagttgtgagccaccgcgtctggcctatatttatatattatatattttatacataactgattatatataaatataaaaattatataattatatattaaaatataatttctataaaatattataatatatatgatttttagatattatatataatcagttatatagtatatataatttgtatatatatagacagagagaaagagaaagagaaagagagagataggataagggatttattaggggaacttggctccattacaagtccaatgatagaccatttgcaagctggagaaccagggaagccaatagcatgacttaatccaagtctgaaggccttggattatatataactcagtctgaggttgaaggcccaagtgcctaggaggtggctggtgcaagtcctagagtccaaaagcccagagaacctggagttttgacactcaagggcaggagaaagatgtcccagctccaaaagagagagcatagactttacaagtggagtcacatttgcctggtggatgacatccaaatgccagtgagcactgattttgcaacattgtggcacagtgagttcaggggcagagaggctcatatttgaatccagcacttgcttgctctgtggctacagcaaattacctaatctagctaacctcaaattgttcaataaaataggagtaataaggttggttgttgtgaggaatgaatgaaataatgtatgccacacttcctggcataataaacggtagtttttattaccacagtgtcagcagtacttgccttggggatggtgtcggggagagaggaaaccttagtagattttgatcactggcttggcttctggaaaggcacttcctgaatttacaaaagtttttgtgaggaagtagagaaaggagggatcgcatgtaaagtggctcagacaattcattgggtgagacattttgaattagaaaagctcaaaaggggtaagcacaaaaagtttacgggacgaaatcaaaatgctgagatgcaagatgggaaaggtgggcttcagcttgaatgacagccctgctagaattagttcaatgagtgctgtttatttataaagtcagtaagatagtgggatgcataaaagtcaaagggcaggaagtggcttctcagcttttcccagcactggtctgacctcaactgtggctactttgtgtctcccctttaaggaggttgtggggaactggcagagctccagagaagagcaaaaatgtaattaaggcttggaaaataaaggctatgaggaaaggccagaaagctgtagggttagttaacttagagaagaaaggtccaactgatttgaagggtcattaacagaaaaacattggttgtttctcatctccacaaacaacaggacaagaggaaagaagcttacattgcactggagaagggtttggcctgtgagaattgttaacaaggaagctctcaagcctcgtgctggcaattgaaaaagaaaatggattaaagtgcaactactgtgtgcccacccattcattcacactgacttgcaaagggagtgtgaaggtggtttcagaaaccgtttgcataagtttgaaaaataaacctgttgtttcctcttcatttgaactcatttagttgtttactatttaaatccagatattaacaaaaagttagtttgaaggtttagatgcaaattagatcggttcagaactttctaggtaaggccttgccctattaggttgattttgaccaccacaatcttttaggccaggcttattcactacatctcaggagaaactatatttggttgtgacttttgggaagagtcggataaaccccagtgctggcatctatattattgcacagcaaggctgcagtgatctgaacccgcaggcctctctgtctttcattttggccctttggctggcgatagaaaaggtgtggccctgcaaggattatgaagagtttcagctcaggatgtggtggtgtccaagttagagggagaggtgtacatttgtttctgcaaatatgtggtctctcaatgattcctgctatgcttccaatttaggtgactgaattcagtttggatacttctgccacaaagtgaaggcatgcttagtaaggatttttttttttttttttttttttttgagacgaagtcttactctgtcacccaggctggagtgcagtggcgtggtcttggctcactgcaacctctgtctcccaggttcaagcgattctcctgcctcagccttccaagtagctgggactacaggcacgtgccaccacacctggctaatttttgtatttttagtagagatggggtttcactatgttggtcaggctggtctcgaactcctgaccttgtgatctgcctcagccttacaaagtgctgggattacaggcatgagccaccctgcctggccaagacagagtcttactctgtcccccaggctggagtgcagtggtgtgatgttggctcactcaacctctgcctcctgggttcaagcaattctcccgccccagcctcccaagtaggtgggactacaggcatgcaccaccacacccagctaattttttttgttttttttttttgttttgtttttcttttttttagtagagacaaggtttcactatgttggccaggctggtccccagctcctgacctcaagtgatccgctagcctaggcctcccaaagtgctgggattacaggtgtgagccacctcgccaggcttaatgaagatttcaaaaagactaaaagagctttacccatcatatttctgttctcctttccatctacctctttccattagcatttctgttattaattttcaattaccttagtaatacagaacaatatatcttgggatatttccatgttggcatgtatagctctacttcctttgttttaactagtgcttttttattccttagtatagatatactgtcatttatttttgacataatttaaaaatactttagtaataatggtgaaggcagaataatggttacctttggaggggtattggtcgtatgtggcgtgcaggaatatctgggaggatgctataaataaatgttctatatttggctctgagtagtgattatataggtgtatacacatatataaaattgtcatttttatactttacatactttattgtatgtaaattatacctcaatacaaaagtttttaaagtgaactaaaatcatcatatattaaaggtattataaagtgttaaatttcatttctaaagaaataggacagggatgcagaaaaggagaggtggggaggaagggagctaacatttattaagcaccttctatctgtgtattatataatttcttatataattatcaacaactctgtggagtgggtattctttttttttgtgacaggatctcactctgtcgcctaggctggagtgcagtggtgggatcatggctcactgcagcctcaacctcgtgggcttaagcgatcctcccaccctagcctcccaagtagctggaactacaggagtgcttgaccacacccagttaatttttacattttttgtagagatagggtttcaccatgttgcccaggttggtcttgaacacctgagctaaagttatctgcccacctcggcctcccaaagtgctggaattacaagtgtgagccactgtgcccaaccattttcttttttttcttttaatttttaatttttgtgggtacatagtaggtgaatgtatttgtggagtaccagagatgttttgatataggcatggaagtgaaataagcacatcagagtaaattgggtatccatcctctcaagcatttatcccttgagttacaagcaatccaattatactctttaagttattttaaaatgtacaattattattgactatagtcgtcgtgttgtgctatcaaatagtagcacacattcattctttctaactattttttggtatccgttaaccatctccacctcccctcagctccccacttccccacccaaccccagcctctggtaaccatccttctactctgtatgttcatgagttcaattgttttgatttttccatcccacaaataagtgagaacatgcaatgtttgtctttctgtgcctggcttatttcacttaacataatgacctctggttccatccttgttgttgcaaatgaatggctctcattttttttttatggctgaatagtattccattgtatatgagtaccacattttctttatccattcatctgttaatggacacttaggttatttctaaatcttggctattgtgaacagtgctgcaacaaacatatctctttgatataccgatttccttttttttttttttttttttttgagaaggagtctcactctgtctcccaggctggagtacagtgacacgatttcagctcactgcaagctccgcctcccgggttcatgccattctcctgcgtcagcctcccgagtagctgggactactcgggagtcccagcacccgccaccacgcctggctaattttttgtatttttagtagagatggggtttcaccgtgttagccaggatggtctcgatctcccgacctcgtgatctgcccgcctcggcctcccaaagtgctgggattacaggcgtgagccaccacgcttggctccgatttcctttcttttgggtatatattcagcactgggattgctggatcatatggtagctcaatttttagttttttgagaaacctccaaacttttctccatagtggttgtacacagtgtatgagggctccgttttctccacgtcctcaccagcatttgttactgcctgtcttttgtatataagccattttaactggggtgctatatctccttgtagttttgatttgcatttctctgatgatcagtgttgttgcaccttttcctgttcctgtttgccatttatatgtcttcttttgaaaaatgtctgttcaaatattttgcctatttttgattggattagattttttcctatagagttgtttcagcttcttatatatacgggttattaatcccttgtcggatgggtagtttgcaaatattttctcccattctgtgggttgtctcttcactttgttgattgtttcctttgctgtgcagaagctttttaccttgatgtaatcccgtttgtccattttttgctttggttgcctgtgcttttatgagtttttgctcaaggaatttttgcccagaccaatgtcctggaaatttttctgattttttcttgtagtagtttcatagtttgaaggagtggatattcatattccattttttgtagacgagaaaatataaaaagggtggccaggcgcggtggctcccgcctgtaatcccagcactttgggaggctgaagtgggcggatcaggagttcaggatgtgtccggaattggtgggttcttggtctcaatgacttcaagaatgaagccgtggaccctcgcggtgagtgttacagttcttaaaggcggcgtgtccggagtttgttccttctgatgttcggatgtgttcggagtttcttctttccggtgggttcgtgctctcgctggctcagaagtcaagctgcggacctttgtggtgagtgttacagctcttatggcggcgcgtctggagttgttcgttcctcccggtgggtctgtggcctcgctggcttcaggagtgaagctgcagaccttcgcgacgactgttacagctcataaaggcagtgtggacccaaagagtgagcggcagcaggatttattgcaaagagtgaaagaacaaagcttccacagggtggaagaggaccccagcaggttgccactgctgactagggcagcctgcttttattctcttatctggccccacccacatcctgctgattggtccattttacagagagccaagtggtctgttttgacagggtgctgattggtgcagtttacaatccctgagctagacacaaaggttctccacctccccactaggttagctagatacagagtgtggacacaaaggttctccaagttcctaccagagtagctagatacagagtgtcgattggtgcattcacaaaccctgagctagacacagggtgctgactggtgtatttacaatcccttagctatacataaaagttctccaagtccccaccagagtagctagatacagagtgtccatttggtgcattcacaaactctgagctagacacagggtgctgattggtgtgtttacaaaccttgagctagatacagagtgccgattggtgtatttacaatccctgagctagacataaaggttctccaagtccccaccggactcaggagcccagctggcttcacccaatggatcccgcaccagggcgcagatggagctgcctgccagtctggcgctgcagtgtgcccgcactcctcagcccttgggtggtcgatgggactgggcgccgtggagcagggggcagcgctcgtcggggaggctcgggccacacaggagcccacggagggggcgggggggaggctcaggcatggtgggctgcatgtcccgagccctgccccacgggaaggcagctaaggcccggcgagaaattgagcacagcagctgctggcccaagtgctaagcctctcactgccggggcggcggtgccggccgaccgctccgagtgcggggcccgtggagcccacacccacctggaactcgcgccggcccgcaagtaccgcacgcagcccggttcccgctcgtgcctctccctccacacctccccgcaagctgagggagccggctctggccttggccagcccagaaaggggctccaacagtgcagtggcgggctgaagggctcctcaagtgccaccaaattgggagcccaggcagaggaggcgccgagagtgagcgagggctgtgaggactaccagcacgctgtcacctctcaaggagatcgagaccatcctggctaacacggtgagaacccgtctctactgaaaatacaaaaaattagccgggcgtggtggcgggcgcctgtagtaccagctactcaggaggctgaggcaggagaatcttgtgaacccgggaggcagagcttgcagtgagctgagatggcgccactgcactccagcctgggcgacacagtgagactccgtctccaaaaaaaaaaaagggtaagtttgctcaaattcacacacacttggtaaataacagggtcaggcgttgaactaagatcattccaactctattctgaacgtaattctgaaaagaggctgttaaaagtttaagaaagtagagctcataggctgagtgaattgcccaagatcatgtcaaatccactggtctcctagcccaccacacttcgttaaaatgtagtttttgaaaaagatggggtcccactatgttgctcaggctggtcttgaactcctgggctgaagtgatccttctgtgtgagcctcctgaatagctgggactacagggcgtgccaccatgcccagctccacactgcacttctgtgcaacaaccgacttcctctccatttaattttcagaatgtccaataatgttattcttttttagatcctggatgaaaatactttaagtgaggatttactgttggagaaacttctagaaatttcctactgtcaaagaatcaaacatttgggccgggcacagtggctcacgcctgtaatcccagcactttgggaggccgagacgggcggatcacctgagttagggagtttgagaccagcctgaccaacatggagaaaccccgtctctactaaaaatacaaaaaattaaccaggcgttggtggtgcatgcctgtaataccagctacttgggaggatgaggcagaagaattgcttgaacccgggaggcggaggttgcggtgagccgagatcgtgccattgccctccagcctgggcaacaaaagcgagactctgtctcaaaaaaaaaaaaaaaaaaaaaaaaaaaaaagaatcaaacatttaacattcataaaagggcgaccttaaactatttgagagcctgagaacattatcattttggccctagggcaacgtgaaaattgtatgctctcatggaaaatgatttggtttttagcctcacatatgtgtatgagagttaaggactttacttattttggaagttgtggatgatatatcacttatttgaaaggtggtaagaattgttcaaactgaccaaggagtatctgggggcaatttaggaaattaatactaaagtatgaattgcacaaacttctatatcattttggttatagagactgtttttcccttttctggctacttctcagtttaattcataaaaaataataattaagggccgagtgtggtggctcacaccagtagtgccttccagccctttgggaggccgagtagggcggatcacaaggtcaggagttcgacaccagcctgaccaacacagtgaaactctgtgtcttctaaaaatacacaattacccaggcatggtggcggatgcttgtaatctcagctatttgggaggctgaggcaggagaatcgcttgaacccaggaggcagagtttgcagtgatccgaattgtgccactggactccagcctgggtgacagtgcgagacttgcctcagaaaaaaaaaaaaaaagttcctctttctacacttttcatttttaaaaacattttttccttcattcttctctgccataaatttttttctacttctcactactgagttacatatgttttcattaaatctcagcatttggcatgagattgtttacatcaaatccacttgattattttttagaaattgataattattctttttcagtaatgacaagaatgcagcaaaaacacatactcctaatataaccagtgtatccccataattggaataagttctattctgaaatatcatctattgagaactatgccctcaatagcacattttctagaactgtaaataatagaatcttagaatgttagccatggaagaggcctaattttgcacagaggaaaaaaaaagtctagggatctttgtgcaaattggttcctttcatcagtcagcaatctgactctcataacctaaagaaaatgatgtttcttggctgggcgcagtggctcacgcctgtaatcccagcactttgggaggccaaggcgggcagatcacgaggtcaggagatcgagaccatcctgtctaacacggtgaaaccccgtctctactaaaaattcccagccactcgggaggctgaggcaggagaatggcgtgaacccaggaggcggagcttgcagtgagccgagatcgcgctactgcactccagcctgggcgacagagcgagactctgtctcaaaaaaaaaaaaaaaagaaaaaagaaaatgatgtttctttatattattgattaaatgagtccataattcctacttccttagtggaagtggttttggaggtgtgtattataatgcatgcaaagttgggaatgctttttggattctcttgttatttaatttgtaaacatagaatcactggtaaagaaagaagaaaaggagaacaaaagtatagcatatttcttccagctacttgggctctttggcctgaagccaggttacaaattagcagtatcatgttagaaagtcccctaaagttagcgatattccttgttgcctctagagtagactcaaaaagaatagacctatgattttctctgctggaatatacttcttatgctacatggaacttttggctctttttgactgtttctctacattgagcaagatagtcaagtccaacttcatgttcataagatttgacattgacgcaagatttttctcagacactttgccacctggagacctctagccagccatgcccctgcctgggccttgctaggcctgggctggcaacaagcggtgccccgcccactcagccaaccgggctgtacctggcttgtactccagcatggatcccgtggtcactgcaactgtgcactcagcccctggtgggaggagggtgtgtgagcaagcgagtgcaggcctggccagctgctccaagtgccgacacaagagtgggctctgtgcagggcttgtggctggaccaggtgttttgcaagcaaactcctgtggtggagtccagtgtcctgatgaggggaacatggtggtgcccaaacaaggaaggccgcaatcccaaagccccagagagggtgttatggcatgctaacacctcttgtagtcctgcagtctgcagccagatgaaccgggtccaaggttctgggcctggcctgctccaccactgcttcctgtcatgtgggggcggccacagggtgctggtgggctacactgttactgccttcttcgtgctggtgttcactggggtcccaagttcttgtcctgtgtccaagaagaatgagatcagactgacaatcaactggtaagaagggtggagaagagttttattaagtgacgaaatcgctctcagggaggggagctgcaagggtggttccgccacccaaagtcggtggtctctcttagtgtggctcagtctggtgtttttattggcacaggatgggggaggggcgggccataggtagtattggaaaaggtaacattcaattgattaaaaggcattatttggaaagaacgaattggaaaagtgtgggcaaacaggaatggaaattctcactctgggtcatcagtttcatctggaaccagcagcctggtctttcaggcttcaggctgtttttggcttgaaggtgcggtttcaccgggggcccgccccatctgcctaggtatttttctgcctcctgcctctatcaacatggttatgattttctgattatgacagatccacaaagtaaattcaaatctattatctgatgaataaaaggttttgttcaaagtgagttactactacttcaatagaaatatattttgaaatattatttctggaacatataattttataatatttaactctaaaaggagctacatttccttctcttcccaaaataatggttttcttgtttttcttttctgattaccaaaataataaattgatgcataaaattcaagaaacagaaaagtattaagaaataaagttatcctaattcccaatgttgacatgttcaaaaacatcctttttgatatctttctatgcatttattttatccacgatatatgtgcatgtgtgtgtatgtgtgtatatatgtatacatatatatttttaatgtaaatgatatcatattcttttgtagtttgcttttattcaacaatctgccatggagattttctttcctttaatgagtgttaaattctttttggcaactgcagagcaacccattgtatggatgtgccagaatttaattaatccccaactgatggacattaggttatttccagtttattattaaataagcaagggctgagttaacactttaccccaagagcttatcagtaaagtagataaattcctaggagtctgattcatgttactgatttgcttttccaaaactggcttgctttctaaaaccttattttatatataaatatttatatacatgtatatatgtaatatatatattttaccagctttcattgctactaataatatctgagagtatagaaggagatttttcagttcactgacttgaaagtcttcaaatattcagaattactatgcattaattttggcaaacaggtgtcaaatgttcttaatgagtaggttaaatgaatgtggtagtaatgatcagaaggcaaaacgagtctatccaactgtttgtcaagtagtcagaaaaaatctcttttttctttatgcccctacacacaatactttgggtatacctctattggagcacttttaaaattttgacttatattcttaggtgtctttccagttaatgttagctctctgaagacaggaactgcgctgcaatcctgcaacgatctcatacagtgtgtttgtcccttaataaactttgtggatgaataaatagccacaaaattttccatttgcttctcctgcatttagaagcatccacttccctctcttccctttgcttttgaaatataagtgtaatatttgcccagggtaaacagacttggagcttgggagacagcattgtgtaatggatgttaatttggcctgatttcactcttggctctctgatttgttagatctatgaacctgggcaagttgcttaagtcctagttttctcttctgtaaaatgaagataatagattctacttcaaaaagtgttgtatggattaaaggagatcacattttaaagcctttagcaaggtgcctactataatacttgatgaaggatagctataacgattgctgtttcctcaaaggtacagatatcctaatatatatatatatatatatgtatgcatgtatatatgtcattggctatttcttgccttccattctagtggacacaacaacttctgggttgaaggcaaaaagaacctaaaagttaatagagattaggggcttaggctctcagtaaaatcaatttggaacatatgtcagttgataaaaattagatttttatgacgttttcaaaacaaatgcttggagtattgaaataggggaagagtaggattgggctaggtagtagtaaccataagagtgttttattagggtaaaaaaaaaataactgtaggccctatctagcctaaagcaccacattatacaattccagggaataaaaaaacaaaaataaaaatgtaaaagttgaactacagtgacctttgttcttttctaactagcaaccaacttttcataatgacagcctacttgagtctttttgcactagggttattattagtttttaccaggcttacctttctgcacttgagcatatgtacctgagcttattttccatgtaacagttgagtcttaaaaacgtgggaacggccaggtgcagtggctcacgcctgtaatcccaacactttgagacactgaggtgggagaattgcttgagctcaggaattccagaccagcctgggcaatatggagaaacctcatctttgccaaaaatacaaaaaaattagctgggtgtggtggcgtgtgcctacagtgccagctactcaggaggctgaggcaggagaactgcttgaacctgggaggcagaggttgcagtgagctgaaattttgccattgccctccagcctgggtgacagagtgagactccatttcaaaaacaacaacaacaacaacaaaaagcacaactccaaaaccaaacagcaagtgcttttttaaaagtttatagagcaaaagatggcaacatcttctgaacataataagcattttcaaatgtgggtcaaagatagctccttttgaaaggcagaatttttaaaaagatgagcaaaacatttacttcgtggaacttagtgaatatcctcttctctgtaagcaaaaatacacttctccccattcctctaaggatgccagatcctgattcattttctgttcaagactcagcagaaacacaatgctccattttatagagggttattgcaacacaatgacggcactataatttctgtcagggtgaagtgcttcacttggctttgggccagtgaaactcagtgttgtttagcccttctgtaattttggacacaggcaaataccttcatgtttatgcattctgtatgcttttaggaagcatttttaaaatgtggttttaacagcatctcattagaagcagcagttggattttccatgtgaccagatttcttatccctggtgtgaacatttagtttttaaggcattgcaaatgaaagcaccacccacttctgaggccaaagcagtcgtaaaacccctttgtcaaaggaaacctgtaattgtaaaattcctccttgatttcatcgttcatgtggactgaaatagagttcctctttttttttttttttttggtctggttatgtggtgtgtggtcattcctttttttttttttttttgagaccaagtctcgctctgttgccaggctggagtgcagtggcacgatcttggctcactgcaatctctgcctcctggcttcaagctattctcctgcctcagcctcccgagtagttgggattacaggtgtgtgccaccaaacccagctaatttttgtatttttagtagagacggagtttcaccatgttggccaggatggtctccatctcctaacctcatgatctgcctgcctcggcctcccaaagtgctgggattacaggcgtgagccaccgcgcccagccccagtgtgtggtcattcttaatgttgttttgaagaagttatagacagttaaggaaacatcttagagaactggccaagctctaaagctaggcacatttcatatttttgtctatttaataaaaaaggacaagactgttttcccggaagcctcctggtccgactcccaatacctgcctgtggatagcactgtggacttttgtcccagaagactagtgtctggataaatgttttgtaagccttacttcctggatgggagccaactgattgcttacacgtgatactcatctccccatgaacagtcatggtggctgctgtgtactggagtcctgcagctgtaaaggggacacgctagaaggagagaagggaacagtcctttgcaggagcacagctgtgtagcaggcctttgatccaacagcaaaaccaagcctagcaagttagttatctcattcctttttagcaatatgacatgacgaacatgctgcaatgacttccaaatacttccctcctttttgcttagattgggggtagaatgaggatagaaaatgagaggtctagggaaaaacaaagtatttgtgtattcagacatttattgactctaaatgcaaacatttactaagtcctctctgcaggccaggtactgtgctcaatgttttacatgagttctctctctcaattcttaccataaccaccaagtagataaatcccaacttctgtttagcagttgaggaaattgagcctttggggaggttaagaaacttgcccaaggtaacatagtagtaagaggcaaagctgggactctatcctgatgcgatgccaagcctatgctcttaaccactgtgctatactgcctccctgtgttagaatatcttttatcttttatccccagcactgtggaagagaagtagaagataacaaacctgctacatggtagatgcctggagataatattatgtatgtttgccattatattatattcttatgttagggtacactaaattgctatgttctatttgaaacaaccaggaaacctaactgggctcaagcaaatgtaattcaagctgtttgatctctaaaatatgattataatgatctcttcttattggcctctctgtctgtccctggctttctgaagagatcttttgttttgtatgtacagttgttactgagaaataccagctgcaggggaacaattcatgacattaccttctccccagcattttccctccccacaacccccggtcctggagagtgctgttattttgaatgaatatgattgacagagatgggaaggtctcacttttgtttatcttataaaatttactgaagccaaaacttctccaaaagaggtcccagcattttcctttggttcagacacaaaccttcagaggaaaataaatgctccggtgaaacatagttgaaagacagagaggcagaaggaggagtaacacttttaggagtttcaagcactgtgatagccattgacttttatttttggaatcctgagggatagttacatctcaaagcacaaactaaagataattcccgagattattgaatgtcctctgatagagacatcagatttcaggttggtctaattttctttgactacttatttctgaaaattgtctgtggaatacggagtccatccttaaattaagctttccctggctgggcgtggtggctcacacctgtaatcctagcactttgggaggccaaggcgggtgtatcacttgaggtcaggagttcgaaaccagcctggccaacatggtgaaaccccatccccactaaaaatacaaaaaaattagctgggtgtggtggcttgaacctgggaggcagaggtttcagtgagccaagatcgcgcactgcactccagcctagggtgatagagcaagagtctgtttcaaaaaaaaaaaaaaaattaggccttcccctaattccatattctgtgtgagggagttcccttaggtaacctaaatcagaataaatctgtatatattcctctggtcttccatacaagtataaagctttctgccatactagaggctcgcaatctcctgtgtttgtagcacactttcaagtgctgtaagtattggcaacacacataggggcttaaaggaattgaaactacaccaccatgttcagtatgatatatgataaaacagtatcttatggtatccatacaagtacatacagcaaaggtacagctcttatgcttccctttccacgccacatctaggtttgaggactgctcagtttactgcctttaccttgatgtcttcatttttttttttttttttttagacagagtctcgctctgttgcccaggctggagtgcagtggcgtgatctcaactcactgcaagctctgcctcccaggttcacgccattctcctgcctcagcctcccaagtagctgggactacaggcgcccaccaccacgcctggctaattttttgtatttttagtagagacggggtttcaccatgttagccaggatggtctcgatctcctgacctcgtgatctgtccacctcggcctcccaagatgttttcttttatgtttggggaacagtgtttccatgttttggaaaacatgtaattgttctttgctgcaatctgtcattacgccacaacttttactttttgcagaatgcatcttgatagacctcagtgtaaccatatgtatactcagttgcagcaaaaatagattttacaaaatttattttaccaaacaaatggagtgccatagcatactgctggaaaaccactgtcttatatacctgaagagtaaatcacaataaaaagaagagcagaatgaggccgggcgcagtggctcatgcctgtaatcccagcactttgggagaccaaggtgggcggatcacttgaggtcaggagttcgagactagcctgactaatacggtgaaaccccgtctctactaaaattacaaaaattagcggggcataggcctgtagtcccagctactcaggaggctgaggcaggagaatctcttgaactggggaggcagaggttgcagctagctgagatcacaccactgcattccagcctgagcaacagagtgagacgctgtctaaaaaaaaaaaggaagaacagaatgaaaaaattggaacagcatcggagggtccttgcccagtggccctacactggcatctgaaagcagagctttgcccttctccttgtgggatgacaatgcgaggctgcttttccagttagtgccacttagagttggctgctctgggagacgtatggacatgaggttgcttggtgaagcctggataatgtgccagaatgtcagtgggttcttatagtttgatgatgtagaggtgtggatatgcggagaataacattatatatatacttaaaagttagcacttgtagggctgggcacagtggctcaggcctgtaatcccagcaatttgggaggccaaggcaggtagatcacgaggtcaggagatcaagaccatccttgctagcgcggtgaaatcccatctctactaaaaatgcaaaaaattagccgggcgtggtggcaggtgcctgtggtcccagctgctcaggaggctgaggcaggagaatggcgtgaacccgggaggcggagcacgcagtgagctgagatcgcgccactacactccagcctgggcgacagaatgagactccatatcaaaaaaaaaaaaaaaaaaaaaagttggcacttgtttggtattaaaagctcaggtttgcaagtgtctgccttgcatttagagaagcttgtggtattatcgctccgtgttcggaattacccaagtgattccaggaagattaggcaagtttattttattatcatgcacattaatttaggaatttggctggaaactttatttccctttttcttaaagcaaatatctaaagttgatcctttttaaatactacagcattcattttcctcaagtttcttagtatcataggcaaatgtaaatcctgggtagtttggagaaatgaatcaaaaagaaggaatgaataaaacacaacaaatttcattcagaataagcctgtgcctaatgcttacgtgcagtgtgggtagggcatagctactttattcaaattatttgttgaaggtctaccatctacctaatctatattctagtttctgaggataaaacagtgaacaagacagatcagtttctgctgtcgctgatcttaaattttagtgggaagggcaaatgacaaacaatatacaaatgaatatataacatgccaaataaggagggaatcgagagtaatgaagtggggagggagccacaagtgctaattcataactggtaggtggggaaaaatttctgataaggcgacatttgaacagggaactggtgagccatgtgggtgtctgtggcaactgtactccaggctgaagaacatcacaggcaaagaccctgaggaggcagcacagtgggcacattcaagagcagcaggaagaccattatcttcctggctggatcaaagtgagccaagaaagcactggaaggtgataagatgagggtgcagggaaatcatgtgggtccttacagactgaggtgagaatttggctcttattctgagtaagaggaatctactggaggattttgagcagaggaatgacatgatcaggcgtacgtttttggctatcgtgtggaagacatggtgggtgggaaagtgggtaggaggctattttgatcattgaaatgagagctcatggtggtctgcaccaggataatagcagtgacagtgatgagaggtggtcagactctggatgtattttgaagacagagttgacatgctttgctgctggactgaacgtggagtgcgaaagaaagagaggagtcaggccgaggcagtggctcatgcctgtaatcccagcactttgggagacgaaggcaggtggatcacttgaggtcaggagcttgagatcagcctgggtaacatggtgaaaccccgtctctactaaaaatacaaaaattagccaggtgtggtggtgcgtgcctgtagtcccagcttctctggaggctgaggcatgagaattgcttgaacctgggaggtggaggttgtagtgagccaagatcgcaccactgcattccagcctgggtgacagagcgagactctgtctcaaaaaaaaaaaaaaaaaagaggagtcaaagatgactccaatgtatttaccacttagtgaccagagaaaggctatttccctgggcctttctagatgagaactgtgggtgggattgtggagataggaatgagggcacagggagacaggctatgcatagaatggggatttcggtgggttgtttcttggtgcataattataaactgttttgctgtcagctacatatttggtgtccttagtctgtaatgatgtttgggaagcctcaaaccaaaccaaagcatttcctctgccatcatgggggccgttttaattgctccagtagagagaaaaatctttgtttaaacaattggaagacaggccaagaagcttgaagtcttttttatggaagagggagggccagtttgaaatttgcaaaattcggaaagactggggaaaaaacccacatatttgttcaccttccctttcaacattagaattagcccagctaagcttaaaggaggtggtgtttaggcagtgaacaggcattactgttttacacagcaggtaataaatagatagaactctgtactccaaggatgatatagattgaaaatataaatgtacttgataagtgtttagaaaacttgcagctagtatatataataaattattgtataaactagggattcagttatactctaccaaaatttattgaatgtgtactttgggtatattattatgctaactgctatggcagatatagtaatgaataaaatacagtcctgttgctcaagagtttctaatcaataggaatgacaacatgcctctaagtataaaaattcagactcctctacactatggtagattgattgcattaacggcccctcccagttttcacagcctttgccctgaacctttgtgttccctcccattctgactctgggctcattgatgtgacttgctttggcgctggaatgttagcaaacatgatgcaagcagaggcttgaaaagcgcaggcgtttcctcttgccctcttgcatgattgggtgtgttctctttttcacttcttccttgtcatgaggacatgacatgcctgggctaacgtactgccaatgtgaggcacatgtggagaagattcaaggccatcctaaacccctcatagcccctgactcccaaacacatgagacagctctgccaagatcagcaggagtgtttctcaatgcacactctgactgcatatgcctacatgaccccagttcaagccagaggaaccattctgctgacccacagatttataagcaagaataaatggccttttgagatagggtcttgctctgtcacccatgctggagtgcagtggtgcaatcatggctcaccgtagccttgacctcctggtctcaagtgatcctcccgcctcagcctccggagtagcggggattataggtgggtgccaccacaccaggcatggctattatttgaagccgcagttttgggatgatttttatgcagcaccactgcagcagataactgatacaggcactcaagactctttgcaactcgtccctgcctttctagcttcttgtcccgcctcccccatgccttttattttattttactgagacagggttctcctctgttgtccaggctggagtgcagtggcacgatcttggctcactgtaacctctgcctcccgggttcaagcgattctcctgcctcagcctcctgagtagctggcattacaggcacctgccactatggctggctaatttttttgtatttttagtagagatggggtttcaccatgttgtccaggctggtctcgaactccagacctcaggtgatgcacccgtctcggcctcccaaagtgttgggattataggcttgagccacagtgcctggccccctatgtactttatacttcaggcaactgagttacctgaattcctgaaatggaacatggtttctcatgcctttccatatgtgatgttttacttctgaaatgttcttcacgcctatctctgtctggacaactgttctttcttcaattccagtgttgctcctctggaaagtcatcctgacaccccaggctgggttcagtgccccttccctgtatctgtagcacagaatgcacacatggttacaattttttttttttttttttgagacagagtcttgctctgtcacccaggctggagtgcaatggcatgtcttggcttactgtaacctccgcctcccgggttcaagcgattctcctgccgcagcctcccaagtagctgggattgcaggtgcctgccaccatgcacagctaatttttgtatttttagtagagacagggttttgccatgttgcccaggctggtctcgaactcctgacctcaggtgatccgcctgcctcggcctcccaaagtgctgggattataggcatgagccaccgcacctggccacggttataatttagtatgctaagcattctctatccccaagaagcagaagttcccgaaaaacagggactgtgtattctctacatcctgaatacaaggtttgacgcaacatagactctccacacacatttgcaagtttgcaaagacatttctttaccttaatgtcactgagttctaagtctcatagagaaaggagagatttctaagagaacagggaagttttcacagaagaggcagaatttgaaatgttccttagttttaatgggtggagagggttccagagttggagaagaacattttgggtagaagtaacacccatagacagtggcaatgtggtactctggtagttgaagcatccagtattattgcagtgaagaattcatgagcaggtgcagtcagaggcaggccattttgtaggggcttgaatagcatcttaaggtattgggtcttcattttgcagggcagtgacaccataaagaaccatattttcaagggttactttggaagcagtgtatagggtatattgggggtcaggaaagaaggagactggatatgtagaaccatctcttgacttttggaacaatccagacagaaggcaatagtgaaagtgagaacgtgtaaaaagaacatatagaagctgggcgtggtggctcacgcctgtaatcccagcactttgggaggctgaggtgggcggatcatgaggtcaggagttcaagaccagcctggccactgtggtgaaaccctgtctctactaaaaatataaaaattagccgggaatggtggctcacgcctggagtcccagctactggggaggctgaggcaggagaattgcttgaacccaggaggcggaggttgcagtgagctgagatcgcaccattgactccagcctgggcgacagagtgagacttcataaaaaaaaaaaaaaaaaaaaaaaaaaactttgggaggctgaagcgggcagattacctgaggtcaggagtttgagaccagtctggccaacatggtgaaacaccatctctactaaaaaaaaatacaaaattagccaggtgtggtggtgagtgcctgtaatcccaactacttgggaggctgatgcaggagaatcacctgaacccagaaggtggaggttgcagtgagccaatattgcaccattgcactccagcctgggtgatggacgaaactctgtctaaaaaaaaaaaaaaaaaaaagaacatataggacattgtaactaaatgtgggaaatgagaaagagaagataattgaagatgactcctagattttttttcctagtgtctggaaaagaggaacaggcttgaaaggaaggttaagtggagtttggacatactgagtttgagatgtatgtcagcggagatctctagcaggcagtgaacaatatgaacctggagttcaaatcagaactggcacacttggggatcttttacctataaaggatcttcaaaaatgaggcccagagagataagaagcctgagagtagatccatatattatgctttatacccaggacaagaagagaaagtagggtctgcaagggagacagagatagatgaagaaacgagagttagaaaaggggaagtgacagacagtgcaaagaaggtcctaagaatgggatgaggaatcagtttcagacaggaagagaagctgatgagaatgaggagtgggggaggggccagtggatttgatcattgagaggccattgagaaaagaatgttttggtctatagttatgggttttgaagccaactttcaaggattgagctgggataaagaagaagtagaggcagagagtgtagagtccaacggatttcataaagagaagagagatgaaatagtagccgagagttgagataagacatttatatgatttgggatttgtgtacataaatgggtgggggtggggtgggaatggggttgagataagggaagactcaaaagctctcagaggagacgggagaaggtagcgttgagagcatataaggaggggtttgcctttagtagggggaactgcacttcttttttctgagatgggaaatagaggagggatatttattttttgccattatggggaacaacgatagcttcacacaggctatgtttgggctgtacttagagacaaaatatcacactagatgatcagccacttgacatggtatggcaattataattttcaaactgcctattttagaggtcatatttaaaagaggaaatgcaagtatattagtctcttcaataacctacttgtctatatgaccaagaaatgttaaactgccaagtggtaaaaatcaaatgtttgttcatggttttctaaagagtgggaaatcaagcagatgatatttatcgaatgcttgcttatctatcaacaaccagttttttaatgtctgcaaacattgagggtaatggaaatgaatagtaatttcagtgcaatgtaggcacaacctgtatatgccctttattttattttagatggtggtttcactctgtcacccaggctggagtgcagtggtgtaatcatggctcactacagtctttacctcctgggctccagcaatcctcctgcctcagcctccagagtaactgggactataggtgcgtgccattatgcccagttaatttttaaattttttgtagagatggggtcttgctatgttgctcaggctggtcttgaactcctgtcttcctgtgattctcccaccttggcttcccaaagtgctgggatcacaggtgtgagccaccatgcttggcttctctatatcctttttatttggaataaggactttgtaaaatagaagaacgtttcacaagcagtttcaaaaatagacccataactgtgtatataaatatctacttgctcatataattaaggctgcagcaaatacatgcccatgaaaatatttgtattaaattggtagaaatttataaataattaaaaaaattgttcataaaattctgctaaatgcagttcatgcttttatgacaaaaaaagaatctcaagaattgatctttgaaccaagtctttatataaggagcagttgaaatgaggtttctcattgctatgcttgcttggtttaaggtaattttaatactcttgagtctgccctagaaaatgttttattaaaatatttgggtggcctattatatttttgactgaggatgccaagatgtggatgaaaaaagtctaaggacaaacaaggctgtggcaggtggttgcatattcttgagttgctttcatgtcttggcaggaagtgaaccaccattccgcacacattctttgcctgttttccttctgcccctgtgcagactgttgatgatgttctctaaggagaggctgggatgttgagggtgcttctcagaaggaagcctgctttgatctctgctggacggacaagtgaccctgatctcttgggtcatgtctctctttgaggatccccagttcatattggtgtttggacaaggaaaaaacactgtccctgcactcccaactgtgggggccttggctgcatggcccaatccatcaagattccaacacaccctactgaagaggaagccttacaaatctgaactttggtttaggcaactaggaatcaaagatttttttttttttttttttttttttttgtgaaacacttgccctttttacaaaacgcctcaagaaaaatacttttaatactggagccctataaacttaagaaaatttgatttttttgatgaggaaataccttgatacctaaaacagaggatacaagtaaccctccctccctaaatattgttatttaatctatttaataattttgaattatctggagataagcaaaatgtaagcaaaagtaggagagaaagaaaaaaatacatatatttgctttatggtttacagacagtaagatatggaaattattgcttgggtatctataattattaataaaaattccaggaaatctatgtaaaaaaaatagcatacatgactgcgtgtggtggctcatgcctgtaatcccagcactttgggaggccaaggtgggtggatcgcctgaggtcaggagttcgagaccagcctggccaacattgtgaaacttcgtctgtattaaaaatacaaaaaaattaccccggcgtggtggtgcatgcctgtaataccagctactggggaggctgaggcaggaaaatcgcttgaatccaggaggcagaggttgcagtgaactgagattgcggcactacactccagcctgggtgatggagtgagactcgtctcaaaacaaacaaacaaacaaacaaaaaaccaacaaaacgaaccaaaccatgaagctaaggaggaggataatttcactttctgaggaattctcaagagcaggcatcttaatggtgtgtcatttatgtgtcaaaaagaaaaatggtgtcactcaaatttgtccctcttattcctattttctataagagttgatactgaaactaagtcaggagcagggggcttcccattattttctgaaggttccaaggcctgggctctgtttcctctatctctttttggccctctgaatcctgcaggcaactcagaccactaagccctttctctccattcctgtgtacaggggggcaagaccttaattacaaaccacacattcatatattctcatagagtatggttgctaataatctaaatcctagtggtttatttcaccctggaagttctaatggctttggggagtggattcttggtattttgatttttttttggtataactgtttatgtatatgtgttcacacatatctatttgagtgaccatatggttccttaagtacttagtgattgtcatcttcagataaagccccagcactttaacatgcctggaatcctctttcccttattctttgtctggttgacacttcctctctttatgggttcagctcagcattaatcatttacagcaaatgtctgaggccccagaatgtatacagggctctcatctctcctcctgaatcacttagcatattataataaaattattcactgattcattggttcagcaaatatttattgagcacctacacttattaacctagcactataagctccaacaggtcaggcttctctgctaaaaaatagacctccataaatatttgttcaactaaaatagatatatattatttttagttttaggggaaaggcttaattggttgcgatgaatgtaattgctgttagagaagcagtgtgatgtgaaagagagagaaaaaaagaccttactggagttacaatcagaataacttgttataggtgctggctaagagcctacctttcacagtcaaaatacctagattgaaatcctggctcttttgtttgctggctttgtggcatccagcaaattatccactctccttgtgtctcatacgtaagatggaggtcatgacaatacctaatctacaaggttattgagagagttatatgaggaagagagtgtgttgtaaattttgcagtgacatatttataaaatcaggttttttttttctttgagacggagtctcgctctattgcccaggctggaatgcagtggcgtgatctctgctcattgcaacctctacctcctgggttcaagcgattctcctgcctcagcctcccgagtagctgggactacaggcgtgtgccaccacactcagctaattttcatatttttagtagagacggggtttcaccatgttgaccaggctggtcttgagctcctgacctcaggtcacctgcccccttcagcctccccaagtgctgggattacagcgtgagccactgtgctctgcctatttgtttaggtttttaagtttctcagtttgatccttgatcctgctcctcaaactttaatgtatatacaaatcacctgaggatctggttcggctgcagtttttgatttagtaggtctgaggtggggcctgagattctgcatttctaatgagctcccaggaaatgctaatgctgtgctccacaggccactatttggtctggcctagagtcatagttttcaaatcgtactgtgcatcagcttttcctggagggcttgtttaaacatgattgctgggcctctcacctgaagtttctgcttcagcaggtggaggatgaggctgagaatttgcatttttttctttttccttttcttctttaattcttccaaaaaaaaaaaccgtaatacatgtgcagaacgtgcaggtttgttacaaaggtatactgtgccatggtggtttgctgcacctgttgacctgtcctcgaagttccctcccctcatcccccatcccccagcaggccctggtgtgtgttgtttccctctctgtgtccatgtgttctcaatgttcagctcccacttatgagtgagaacatgcagtgttggttttgttttgttttttttagacagagtctcggtctgtcacccaggctggagtgcagtggtatgatctcagctcactgcaatctctgcctcccaggttcaagtgatgcttctgtctcagcctcccaagtagctgggactacagacgcctgccactacacccagctaatttttgcatttttagtagagatggggtttcgccatgttggccaggctggtctcggactcctgacctcaagtgatctgcctgcctctgcctcccaaagtgctgggattacaggcatgagccaccaacccagcctcatggttttctgttcctgtgttagtttgccaaggatgatggcttccagcttcatccatgtccctgcaaaggacatgatctccttcctttttatggccgcacagctgagaatttgcatttctaacaagctcttatgtgatgctaatgctgctgatctagaaacctcatcctttgagaaccactgatctagaaagattgttttactcggagagtaaattactttgctatgcttcagaaaacaggaattgggacttaagacttggattctgcctcttagattatagttctggtgcctaagcacatttaatactattttttaacaatgatgggcactgatgtgtttctatgggctttgcattgtcgaggtctgccacaactgtagtaacaatttaaccctatcctcagacccctataaagattaccctgagaactaatgagattttatttatttattatttatttatttttgagacagagtcttgctccgtcggccaggctggagtgcagtggcacaatcttggctcactgcaacctccatttcccgcgtttaagcagttctcctgcctcatcctccctagtagctgggattacaggcatgtgccaccatgcctggctaatttttgtatttttagtagagatgaggtttcaccatattggccaggctggtcttgaactcctgacctcaggtaatccacccgcctcggcctcccaaagtgctgggattacagacgtgagccaccgcaccaggctgagccaatgagattttatttcttgactagacatctcccttctcccttaagatgaaggtagaaaagagaggaaaatattttagtaaggttctcatcaggcatagtgaacagcggctcatgtattgatagcctttgccataagaaatgatatactaacatagtggattctcttcacagacttaacgggaaggttggtacagacacacttgaaaggcatgggttatatgactcctcaagggtttactcacagaaaatcattaaaaaaaagtgtgtgtgtggttcaaagttgtccctaattgaaacaaacattaggaagatgcaatatcaaaatatactgaactgggccaggaacggtggcttacgcctgtaatcccagcactgtgggggactgaggcaggcagatcatgaggtcaggagttcaagaccagcctggccaacatagtgaaaccctgtctctaataacaatacaaaaaaatcagccgggcatggtgttgggcgcctataatcccagctactcaggaggctgaggcaggagaattgcttgaacccaggaggcagaggttgcagtgaggtgagatcatggcactgcactccagcctggacaacagagcgagactccatctaaaaaaaaaaaatatatatatatatatatatatatatttagaactggatcttcctaggtttattggtattctagctctttggagtggagagatgttggcagcactttctggaagatcagttgttcttctatgtcagcctggtactcttagtccaagcagcctcttcagtttaaaggagaaaaggaaaataccatgaaacaaaatcatacttccctatctgggaagtggatcaactgtctatgtccagtttatggccccttcttcactatgggatggtgtgctatattctggagtaagttcaagagtggttcttgtcctcaggatatttatcattttaagagagatgaggatttatgtaaataattatacgaaaggcagaatagaagaattgttatatcaaccacactaccaatgtgaagaagacatgcagaggaaacaatataatacattctgcttgaggaagttggagatggcttaaggaggctgtggcatgtgggctgagactttaaaattaagaagatttcagagctgggcatggtggcccactcctgtaatctcagttactcaggaggctgaagtgagagcattgcctgacaccaggaattcaagacgagcctaggcagcgtcacaagactccctcccctaccctcacaactctaaaaaaattaaaaaaaaattagccaggcacggtggtgtgcacctgcagtcctagctacctgggaggctgaggcggaaggattgcttgagccctagaattcgaggctgcagtgagttatgatcacaccactgtactgcagcttgggcaatagagtgagacctcatctcttaaaaaaaaaaaaaaaaaaaggccgggtgcagtggctcacgcctgtaatcccagcactttgggaggccgaggtgggcagatcacgaggtcaggagatagagaccatcctggctaacacggtgaaaccccgtctctactaaaaaagtacaaaaaaattagctgggcatggtggcaggcacctgtagtcccagctactcgggggctgaggcgggagaatggcgtgaacccaggaggcggagcttgcagtgagccgaggttgcgccactgcactccagcctgggggacagagcgagactctgtctcaaaaaaaaaaaaaaaaaaaaaaaaaaaaaagggatttcagtagatggagccctgttaaggagtttatagcgatgtaatgtacttactatattgaacctagaactaaagtttccacttggtggacctcacatacattgtaagggttatttcccctcaagtaagtggtgtgtaatgcagaaaaatagaaatgaactttaccaaaggaaatgtgtgttagattttgttacacgaaaggtcaatgtttgcttagatattttttaaaatttctgtgccctgattgcctcaagacccagtgagattttggttgtttgaccagatgcctggtttttctgttggccctgtctgcacaattctaaagtggaattcaaggctgtctatagtttaaagactgattacttcaactttagaggccattgctgtgaattatcttctttacatcttgtagagccctatagattatttacaataagaaagttggataagatacagaaaagactgaattgcctttttagatctaaatttaaatttgacggaacccaaacttgctcctttgctctgtgttatcacatctgctttgggacccactagactgtcatttacttaactgtcccatttcctcaactgttctgtttccccactatcagcagttttctggtatcatttccttacaagccaacctagacttgtaacctatccctttgaccactctctcaccattttattttattttccatccattgcactcacccaccaagtccttaaccctagatcaatccaatttctgactagacagctgtgatggctaataccgagtgtcaacttgattggattgaaggatacaaggtattgatcctgagtgtgtctgtgagggtgttgccaaaagaggttaacatgtgagtcagtgggctgggaaaggcagacccacccctaatctgggtgggcacaatctaatcagctgccaggtcggctagaatataaacaggcagaaaaatgtgaaaagagagactggcctagcttctcagcctacacctttctcccgtgctggatgcttcctgcccaccaacatcagacgccaagttcttcagttttggaactcagattggctctcctggctcctcagcctgcagatggcctattgtggaaccttgtgattttgtgagttaatacttaataaactccttcttagatatgtatctattccattagttctgtccctctagagaactctgactaatacaacagctttatccctttacttaatatatgtgtttccatgtttaggtgtgtttcttgtaagacatttatagctgcattttgttttggtttttattcaaatctgagaataacggtttcttaaattggtgagtttaacttgtttatattgtgattactgatttatttgggtatatttatatcaccatttgaaagaaattttatgttttttctttatgctttgcctttacttttttagcatcactttaaaaaaagaaatttttctttgttttaaaaatttacatttttttcttattctttatttgttaccttaaaaattttaacatgctggccgggtggggtggctgacacctagaatcccagcactttgggaggccgaggtgggcagatcatctgaggtcaggagatcgagacaagcctaatcaatatgatgaaaccctgtctctattaaaaatacaaaaatcagctgggcgtggtggcatgctcctgtaatcccagctactcaggaggctgagacagcagaatcgcttgaaccggggaagtggaggttgcagtcagctgagatagcgccattgcactccagcctgggcaacaagagcgaaactctgtctcaaaaaaaaaatttttttaacatacctatttaacatgcctatttaactaacattaataaatatttctattctccctcagaacaatataagcactatggaatagttgagctctgacatccatatctggtattccatgttgttgctctctagaattttagttccatcttgtttttaatccctttactatttgaacaaaaatttaattttatatatacatatagaaaagtacataaatcataactactcatttgaaatattttcaaaaaggaaatataacccaggtaacaaccacccagatcaagaaagagagtattactagcaccccagaagccccacaaagaggttctcagtcaccacccctctcaaaggtaatcttgatcctaatatctgtgatcattgattagttttgcctgttttgaactttatatggactcttttgtctggcttctttcccttaacattgtttttgagagagacatctatgcccttagatgtagcagtcatttgtctattcctattgctataaaatattccattgtatgaatatataatttatttattcattcttctattgatggacagttaagttggttttagtttgttatgagtagtctactatgactttcttgtcttttgtactgtttctgggcacttgctcttaggtacattttctatgtacccatttctgttgtgtatatctaggaatggaattgctgagtcattagacacataatttacattctcaccaatagtgtacgagagttttgtgaagtgcctgttcaaattctttctgtgggttgtacttgtttatcattagctcatttttagataagattactttttactgtggaatcctatgtgtctggggttgtgaatgtatactctggagtgttttgtgggtgtgtattgtgttctgcacttacttctcctgggactctacgtgtaaaatttttggcttgggattctagcacataagggtggtacaaatttgtaactcacacctggaagggacacatgcttaatgtatcaatttctcactgggagagttttccaccttcatccaaagattgaggcagataacacatcttcttgctgcttctttgtgatggtggccagagattttctagattagtactgcccagtagaactttctgtgctgatggaagtgttctgtatgtatgctgtccaacatggtagccactggtactcagtaacccacatgtggttattgaatacttgaaatgtgtgattgaagaattgaattttacattttgttggattttattttattttattttattttttgggacagagtcttgctctgttgcccaggcaggagtgcagtggtgcgatcttggctcactgcaacctccaccttccgggttcaagcaattctcctgcctcagtctcctgagtagctgggactacaggtgctcaccactgcgcctggctaatattttgtatttttagtagagacggggtttcaccatattgatcaggctggtcttgaactcttgacctcaagtgattcaccagccttccaaagtgctgggattacaggcgtgagccactgcacccaacctgaatgttaattaatttaaatttcaatagtcatgtatgggtagtagctaccatgctggatagcacagttctagatcaattttaatagactgggcagcccattgaggatcttggatatacgtagtagacttagttctacttcctctctttttgcagggtctatgccttgtctcttgtcctaatactcttgaccccagcaccagcatctgtctaggctctataacctcaagccaccatatagtcaattggagttggctttactttccttctgtgactaagctcagctatgtagtgcatattttgcaacattgtgcttgagtattcatactggagaggaaggataaatatcagctcagtccacagctccagctcttgtgtacttctcaagccacttgccattgttcttctgctaccactgcccatggagacttccattgctaatagcagctccacagcactgtatttaatggctccttcttaatcctatcctacatgacttgtagaaagctttggctttgttgaccattgcttccttaaagcagtctttcccttggcttctttcatagtaccaattttctttctacttatattgatcctcctttccaggcttcttctaggacttctcttattatgctcacacccccactaccctcattatcaatggggaatcagatctcagtctttttttcttttttttttttttttttgagacagagtcttgctctgttgccccaggctggagtgcaatggtgcgatctcggctcactacagcctctgccttctgggttcaagtgattctcctgcctgagcctctggagtagctgggattacaggtgtgcgccaccacacccagctaatttttgcatttttaatagagatgtggtttcaccatgttggtcaggctgatctcgaaaacctgacctcgtgatccgcctgcttcggccccccaaagtgctgggattacaggcgtgagccaccgcgcctggcccagatctcagttttatttcttttctcactgtatatatcttcccagggtgatttcattccaattgatggcttcaggtatattttatgagctgatgactcccaagtttgttgtcatttttgaagcattaactgttgtcatccctgcaaaacaaaagtagaaacaaaaaatacaaagcagcaggtttttctaggcttataagttttttttttcaagtttcagttatttattaatcagtataatcttcaacacattatatcaacatgatttcatgcatttagaggagaaatacttcctggttaagtggaaaactgtgtggacggcttctggaaaaccttcattctaaagcagctttacagtgacacatttcacttagaaatctggaccttctttcttcagtttgctgtaatccatatgcactgagtagaacttgtattgatccttgggactcagtttgttccagggccctgggttattctttctgtcccaactaacatctggattgaacaatgccagacacaagagatacactgctgctccaggacctccagctccaataaatacaaagaggggcatcaagcttggctgcttcttggtataactgaggatctagcagagcatgtttgcaacagaggccctcgattagaaatgagagaaccagcctagccaccaggccctgggctaagtagtatctggctcataagttttgagagcaagctctaaaactccagtgaacagttagctgcacggtgtatttaggcagacccttgacccagtccttccctgatttgtcttcaaaataattgtgggggcactgaagaattgtgggacactggcaagaagaagaatcttagagcaattctttgatctagttcaattaattaattaattgacaaaaattgtatacattgatggtgtacaacatgatgttttgatatatgtatacattgtggaatggcaaaagcaggataattgacatataaattccctcacatacttatctttttttcttttttcttttttttatggtgagaactttggtctatttttctggtgaataatatgtagcaggactggtaccagaaccaggtcatccagagatgttctgtctgctgccatcaactcgggacctcagaaggtggtactcctcccctaaaggtgaattattttagctaaaaaaaaacaaagagaaatccttatttctagatgaaataagaatcaacaggaaattccaggagatttcagttacatcagttgttacagttggtacataatgatgtaacatctgttccaaagaaaacagcaagtatgtatttaatacacttttacgaagtccccatgttttcttttcttttcttttttcttttctttcctttttttttttttttttttttttgagggttgcaaggtttattgtgaagagtgaaagaacaaagcttccacagcgtggaatgggacccgagtgggttacagctgctggctggggttgccagctttcattcccttattggcccctcccatgttctgttttcatcctatcagaatgcccttttttcaatcctccctgcgattggctacttttaggatcctgctgattggtgcattttacagaccgctgactggtgcgttgtacagagtgctgattggtgcattttacaatcctcttgctagctacagagtgctgattggtgcgttttacaatcctcttgtaagacaggaaagttctccaagtccccactcgaccaaggaagtcctgctggcttcacctctcaatccccgctctaaacaagacatcccagctgaaaagtccccatattttcttttagtaatcattttaatgtgtgtgtgtgagaaaaggacactattaaaagaaacttttaaacttttcttttctagtcctatgtctacttttagccaatatttgtgagcatcaaccatatccctcctcagtaattatattttattttttcctcccaggtcatgtgaaagactgtgtataattcagaagagatatttctacagtgaaaaaaaataccccatatttaaatcaattcaagtttcttcttgacatctaggctgtatctaggacacatctggacatctggaaacatccaaatttgactgacttttccagttttcagcagaacatttagtaaataaaagaataagaaacttgtactaatcatatatttttttgaaagtcaacagcatttcagtggggctgatgtcctcatggcctggcctttatttcttgcctcatgtcagacttaacccatgttggtggaggaggctgacattcaaagggtgtggtttttgaggttgccacatgccttgccatgacttaaaatatctctctctggctgccagatggcctggggaagcaccagacacaggctccattgacctcagaacttgttgctttaggactggaagctctttcagggtctttcttaaatttctgtttctaaatatctgaagcacatcaagccttaaactggggttttgtgctgctcctcctcgctttcctgaaagcaaagggtaagaattaatttcgggcacagatagtaaatgctgacttttcattgttcccttgagaacacttcactctccaagagaaagtctcccttcttcagcccaaatcttgtggaaactgtgcatatgaggtgtggagaaaccccatgggaaaactgggagtctacaaacaggcctagtctttgaggatgctcggcaggggtggaggaagacgcctcaggtatctcttcaggtccaattccctactggatgtagatatacaaaatgtaatttacttccagttattgaatgataatgtcttgaaacattagaaaaatagtcatcttgaaggaaaaggcaaagaagattatttggagaggagaagttttttttctgtttgtagagtggaaaagtgagataaattggtttgaaaaaagaaaagtaaatacattgcaagggaaactttattcattaaacatttattgagcacctactaagtgccagagacagttctagtctctggagatacaatagttagcggactagacaaacatgttctttggccttatggacttctcagtcaagtgaaagggcatggaggggacctaacccagcgggtgtgtgcagcaagggatcagaggagatttctctgaaggagttatatttaaacaaagacctgaatagagttagatggacaaagcccccagtttagtttggcttcattttcaatgatcccattacaaagcaaaaccaaacaaaaattcagttctaagtcctttatttttttctactttagacggttgcctgcctgagatacaactctgatttcaacaagagacaattggattgctatttttctctctcctttgacttgatatttattatttctcatctctcactgtgttatgacttattggtttatgtctgtctctctctgtagactatgagtcactaaaagccagggactgtcttaatagtctttgttcaggcaccacatagctctaggatgaataaataaaggaatcaagatgaatgaataaaaataacagttgttttcacagcatcattttgcatcgagaaaagtgtcatatcaaactattcttcccatccaatctctttaattgcacaactaaccgaatctcccatccagtctattcaataacactaatgcattgagcgtctaccatgtacaggccacatgtttgtcatggggatgtaatggtgagcacaatagacaaggcattggctcttgtggagtgtacagtctgatggaggaagacaaactttatataaataatcactcaaatacttgattcctaattctatcaaaagaaacaatgtaggtaaaaatactgaaataaaagatttgagttgaaaatggcaggaaaatttaaagttttgccaagtttttggatgcctataagaaatgtgtcttatgcttgcttcctcttttcccttctagcttcttgcagtaattgagtttgtaaaatcaagatgcataatttctacagggaaaagcaaataaattgcattcattctaggtattttagctgcctaggttggcccaactgttaatagcaaaacccattttttgggcaaacaccagctaatcattagtggtactttgattttccccaaagttgttttctcgtcatcctgataactatcacgcaagtcagaatccaattttgcacggaagttttagagctctaattaccatcgtctataatcaggggtgttattcctgcacattaagagtatgagaggatataccaggaaagggaaatggaagaatgaaaacaaacaaacaaaccagagaagcaaatgagatgacagatggatatagagatagaaaataagagtaacaaaaatttgcactgctctccaaatgtcagaaagactactcttagaagcttatgaaataattatacacagaacaggatacacattttttttttggctccagatctaagaaaataactctttggtattagaagatgaacattgaaggaacaaactgacctccttaatatagtaggacaataaactactattaagttgatatttcatagttccctttgaaatttttggatataaatcaggattcctcttccccacccaatgttctttccctttctttccatatttttctcatttttgattttttttcttttttctgaatgctatcgtggatctctgaactgtgctgctaatacacatgatatatatgctactgacaataaacaagtatgaaggtgagagggcacatgaaatggtgtgatgacactggataatagtattcacagatattttacttctcagataaaagaaactgctaataatttgaaaaggaaaggcatatttgctactgttgtttaatattgtaaaatgtttgaaaatactgtctcctttattcctagtctggtgttgaattgtttaccattttaataaaaatatgagagctgagttggtaagaataaagacagcaagagagatagaaagaaagaataaaagaagtgagctgggcgcggtggctcactcttgtaatcccagcactctgggaggctgaggtgggtggatcacctgaggtcaggagttcgagaccagcctggccaacatgaagaaaccctgtctttactaaaaatataaaaattagctgggcatggtggcacatgcctctaatcccagctacctgggaggctgaggcaggagaattgcttgaacccaggaggcagaggttgcagtgagccaagatcgcaccactgcactccagcctgggtgacagagtgagactccatctcaaaaaaaaaaaaaaaaaagaaatgaaaaaaaaatagaagtatgggtcactactcacagcttcaccattaaagtagactacctccatctccccaaatgagcctcccgtttgtgtttaccttgtcaaccatggaggacagccaaataagaaccttataacaggttgcacttcatatgccatgagtcatgcatcctcaacaggggctatgtcacccccaaggaagtgaaaattggttgtgagtatatgtaatcttactttctcatgtataaagatacatatatatatatattatatatataaaacagatacatagtttatatgatattaaaattttgtggggggcaattaaaaaatgtctgaaaatgttttttagagggacaacaataatgaaaacaaatgattgagagacactggctttaattgtatcttcatgctttgtagaggaggtaatttacttctgggtgaagctactttatcttaaagagcttgatatttatactgcaacaccaactaggaaatgaccattattgaatgaagccaaaatggtaccatgactaccaaatggtggagaagcttgaggcaaatggataggcttctcaatagccttactataaacccaacaaatatagccccagatcgactatttgtattggaaatgaagtggtaagaggtaaatcattttttgcttatttgcagattttttttttttttccctgagacagagtcttgctctgttgcccaggctggagtgcagtggcacaatcttggctcactgcaacctctgcctcccaggtttaagcaattctcctgcctcagcctcccgagtagctgggattacaggcgcacaccactacgcccggctaattttttttttttttttttggtagagacggggtttcaccatgttggccagactggtctcaacctcctgacctcgtgatctgccaacctcagcctcccaaagtgctgggattacaggccattagccaccacgcccagcctgcagattttaatttacagaatctatagtttcagggatacatgtacagtagacattttcataactgactctcacttaattgacttgccagattaagaggttctccacatcctctttaatgcatcccgctgaggtccatggcactctgcacactctatgttagtaggctactcactgttataccctacgcttctgttctcttcagttttatgcttacttagagtaaacttggtttattcccaaatttatttataccagttgcatttgttactaagttattatttaatgaaataagaggtaagcatattaatgcaaaagaaaagaggattattgtttctacaaaacccaaattgaatgctttaagaaagagtcaacaagaaaagtcacaatttaaattaagaacagtcagagtgattctatgcttgttcccagccatgttcaaatacaggtacagaataggcagagcatgaaggaggtagagaaggtacagggaattaaaggtgtacctaataggttaatgagtatcatgatgaatattggactttaagctggttaaggagaaaaacaagaacatgaaggtcttgagaggtgatgataagatggtaggctttgtcaactggagggcattgggttatagtcagagtcatctgaaatattgcagattgtgattagaggatgaaatacttgaaattaagattatgaagggggttcagttaatggtaataatggtaatgacaagaagggattaggtgctaaagtgctgtaaaggacaactaaataggtgtaaataaaaagacagcagaggccaggttattggaaggatactgaaatcaccaagaattaccccaggaatgtaattggaggaagacaatgaaatggtcaaagaatagagtgtcatgtaattcagtaaatgatgtcggtaagtgccagagatactcagagaacagaaaacatcatgtgttgccatggttggaaaagcatcgtggaggaatggggattgcatctgaggaatcaggtgggatagatggagaggacggggaaggtgttttaggttatgagtcacagagtgagcaaaggccaaatggcaggaagaagcatggtgtgtttttgatgtcagagagtgtaggaagtatgatggctttggattgtaaaaggtttggaatgctagaccaaggtggttgagtttttttttttccactttttctatagaagagtaattactgtttagctgctgccttttagaattctctcaatggggtaatcttttttgtttgtttgtgtcttagagagacagggtcttgcactgtcacccaggctgagtgcagtggctccatcatagcttactgtaacctgggctcaagtgatcctctcacctcaacctcccaagtagctaggactacaggtgtgcaccaccatgcttggctaattaaagaaaaattattttttagagtcagggccttgctatgttgcccaagctgttcttgaactcctggcctcaagtgatcttcctgcctcagactcccaaagtgctggaattccaggcatgagccatcatacccagcctcaatgaactaatctttactgatgttatcctttgagtgagaatttattcttgtattaaaattttaggttgtgagaaattgccttcatttgtaaacacaggtcaatagtcatgcatgttaaaatataaaggggcagatggaaatagatcagaaagttagactataaaaattgagtctgtatccaagctcacttagtggctgtattctcagaagcttgtgcctgttaaacttcagattctttatctttgaacccagatcttagagctcttcatcttagaatgccaccccttcaaatttgtgatttttttttttttttttgagacggagttttgctcttcttgcccaggttggagtgcaatggcgcgatctcggctcactgcaacctctgcctctcaggtccaagcgattctcctgcctcagcctcccgagcagctgggattacaggcatgcaccaccacgcccggctaattttgtatttttagtagagatggggtttctccatgttggtcaggctggtctcgaactcctgacctcaggtcatctgcctgccttggcctcccaaagtgctgggattacaggcatgagccactgcgcccagctgatttttttttttttttctggagaactaaaagtaaacggagttaattctgtcacaaccacttccttttgactttccatttagtatctattgatttgagaagagatattgaactctcacaagactctgtatatagggatgatttgaccaaagtcttctatgtctttagctagaacaacatggaaggtcaaactatcagaaggctactagatgaggtgtaataaaaataagggtagtttttctggatgagacaaatgtgaattgacattgggctttgcatgacctatgtgtccatccccaaaagggtcttcctgtcattcttcatcagttatttcaatcacggtccaagtgggaaagagaaggcacagtcaaaagttttattgaagagaaatagacttcaacaaagggactccttgtagggctgcaggcaagattaaggggactaacaaagaagataaagcacctaggggactagcaatgttgggaagctgttacttctgctcctaggcctgcagggacaaggagagtgagtggtgttagagacccagaaagaacagtagccctgggagaggggcatccaagaggagctgtggacataagtagaggaatgcaaccacttagggaaagagtagacagagcaaatactctggtctctctctcttttcacccttgaatctcctgcaattggtggagcccagctggaagccagaaggcaagaaagcctagatgaggcggtccaaggtggtcaactcctgagaggcagcaaagaagagaagagctaaaaatagatctggacaggcaaaaagagaacaaccaacaccctgtttttgtttttgtttttgtttttgttttttttgagccggagtctcgctctgtcaccaggctggagtgcagtggtgcaatctcggctcactgcaacctctgcctcctgggttcaagtgattctcctacctcagcctcctgtgtagctgggattacaggcacacgccaccacacccagctaatttttgtatttttagtagagatggggtttcacaatgttggccaggatggtctcgatctcttgaccttgatccacctgcttcggactcccaaagtgctagaattacaggcgtgagccactgcacccagctaatgccagtaccctattttttcgactgttagtcctccagaaatctgggtactttcagtttctcccaggagcagccctgtattaaaattctgaaaaattaaaaatcttaaaaaatacttcttgttattaagccactgttagagttttggagagggcccaagaaacagaacatactggggaatgatccaaatgactggcagatgaaagccaaaataccatgttagtgattggtcaagttaggttggaggaatggcttagtgtaaggacctataaatctactagccgagcccagaattcatcagtctttcctacccagtctcagatggcaccaaaccatgtcagggagagtctattcctggaggaaagtagagagtgtttacttttttttttcttgagatggagtcttgctctgttgccgaggctggagtgcagtggtgcaatcttggctcactgcaacctgtatctcctgagttcaagcaattctcctgcctcagcctcccaagtagctgggattacaggcgtctatcactgtgcccagctagtttttgtatttttagtagaggtggggttttgccatgttggccaggctggtttcaaattcctggcctcaagtgatctgcctgcctcagcctcccaaagtgctgggattacagatgtgagccactgtacccagccttgagtgtttgctttttgtgggcaattggtcccccaggggaagatggggaagaaaggggtaggcctattactcaccagggcaaagctggaagggtagagtctggcaagggccccatgaaggcagcttatgctcaagaggaagccgggtggggctgggccacacatacctattctttcaaaacttaccaggcttttctgctgctttggagaggagtgaattaagggcgttggaggggattgccttttctccaccacattttctcattctttagttcattcaacttacagactttcaggagttagccacactatgaaggctggggatgcaaagatgaaaaggatgcagtttatctctagatggtgatactaagaacagctaacagttattcaagatgtgccttaaaatgggatgtagttttcactcatttgtcttaaaacattcacaggcatcatattaaacagataattactaacttttacagatggagacactgaggcttggaaaagttaagggacttgcttaaagtcacagaaattagttaatggcagagctaggattcaaatccaggcaatctggctccggggctagtattcttaactctttcccatgtcacaggccaatgctggagacaggcctgtgagcaaataattacagtgtaatgaatgaggtaagtgctaatggagggacatataccgtgctaagggaatgaaggaaggagtgactaaggttttgtgtaggacatttgtgcaatttcccttgcccactgccagaaatgaacaaagcagagtcttttcggggcatgctttattttgctatacgtggatgtagatatagagctcaattcatgttgccttgctgcccctcccaaacataacaacacttaaaataatttcttcctgacatcctggaccccctccaagagtttgtcccagcttttggacaaggcagaaacaggaaaaggatgtcctaatgttccctgaccagagacctaaattggaatttggaagagtttcgtaattaaaatcattgttaagattttattgtcctgtaccctgtagtgtgtgtgtgtgtgtgtgtgtgtgtgaacattatatatcagccaccacacatgtactatatacaatcactaaaatcaacttttgtgagattgcttaaatctcaaagtttctatagtttgtagatctatgtttagaagatattttgttttttcataaaggagaattaatatttttcaactcaaatactttttttgctatgacttaatcataatttggtagtaatatatcacaatttctgctaataacgcaaaaacaaactcacttctgtttcattctctctcaatagaaattgtttcagtttggccccctatactgattcatttctcagctgatctttgagatattgaacatccatacctttggtatttttatattacttgatattagagcgtcattgaattcatttgaacagactagacaccataaacaggtgctgtctgccgccgccaagtgatggcctattcatgccaggatattaagcatatcctgcagtttggtaaacagaaggtgggattctaatccattcagtatggagcccctcgttctttcctctgtagtgaaggaaaatctctgggaagtccctgctcaggaattctctatagctttagcagttagtgagtctcattccaaaatgacccaagaagagggctggatcaattacccccaagcttcctgttgacataacctatttcttggagtgacctcagaaatccacacaaaagttccaagttgccatgtagcccctttcttttactttactccttttgggtttcagcgttggagaaaccctctctcctttccaaagctgaaactgcctgggagctttgagtctctgactcactactagattgctcacctatcagggccatagagaagacagagtgagacaaggacattcttacaccatggaataacctctggggcttatggtcatcaaagcagagtctttggtctacaggaaaaaggtaacactcttagacccagcagaggcatcagcaagggagtttcccagggggagggacagccctgcttactcaactggtcaggggttactacacacagtagctctactctcacagcctttccttgcttaggcataccagtgtgtcatgatggtgcagctagtctgataaatggagcagttttggagggaggcacactgcaatagctttgcaacaaaagagtctatgtctcgtccatcattcaaaggagttatctgaaaattgatgactgtagcaaactactggctatcccccaaatcaatccttttttttttctatagtaacagaattcccaacatgtagctgagaacagccatggccatataggtctgaggtcagcagagttacacaatagaaggcacctgggttccagacccttgggctgccatactgatcctggactgcttagttccagattgttagatgagacaggggaaaccatctagtgtacctaaactgctattattttgggtctctgtcaaggaggtcaagcctttatcctaattcagtgactttggatttcagtagaatagagtcaatgttagttgagaacatggtgtcattaccccaagtcacctgttttcaacaggtagccttacttctctcagagataggttcttgggacactctgcagtttccactgagggtgcagccttttggggactactatagagatgatttctcctgtctcatctaaaaatctcgacctaagcagcccaggtctagtatggcagcccaaggatctggaacccaggtgccttctatcatgtaaatctgccagtccatatggcctgcctcttccctttaaggatacaatccagaaatggcatcacttatgcttacatagagaaagaaagggctatgatattaggcctcagaaaagggagtggagatctagacttttcacttcaactcaaaaatcctgcccaagactgatacttactcctttaaacattgccatatttctccggcacacccaatgattgacgtctgaaagagcagcagcactttctcagacatgactacagtgtttaaatgtgttgctagggcatctgtggaattttcatattctatcttgggaaagaaatctgatagttctttgatgctacattcttctctagccagaaatacaaggaaaccactgtttgctgtgacattttggcagaactctgaagtgtggtctggatctgggaacccacaatccaagaataaggcaccatttacgtacaaaattgttgaatttggatggaaactaggttcagccatacttgtgaagccactgtcttgcagggtcaaaaagagcttatttttcaagtaagtgtgtttcactgtttactggtgactaccaaaataattatttcctgtgtgggtcagtaagagtgaggtaatctcaaggaaaatgttccattgtgcttactgggctgggcagcgcagcagctccagacattctcttaaagcaacagtaattgcgttgaatggtaaagtctggttcatatgcccctgggagggagattcattttctctttgatactctgaggatcttgtgagagacagcaaatgtgaatatatacatacatctacacatacacatgaacatatctgtgggtgtgcttagcaggttggttcatttaaatagttttatagatattttagaaaggtagttctttatgagccaggataatgtgctctgcttctctcaatgtgaaagtagaacctcaccttgtgcaagttgtcattggtttccttgtctgttacgagccacttgagggtaatgctttgtctttgtcttcccagcccatactaatgggcctatcactgagtaaaattctcattaatcacttgttggatgaatgaatggcttgcaaaggaagtgaattgcaggaaggtgactaccacccaaaagttgacttgtaccatgacactgacatgagagagtttgcccgaaggagtgcttagccagccaggattggaacatcattgaggtgccaaactccatggttccagagattaaacagctctgtgcttcatatcaccatctttcctggaataagaattatccaccccagttgttagattctggcacaacaagtagggtgaattgtggcagctggatcaacaggtgacagacaaactaggccaaatgagatatcacttctggtccataaaatagagagatgcttttgaatattcgatatttcacccagctcactaccttccacgactgctctcatgtaggagccaagagtgtacattgtatattatagaaaatattcccctattataagagggaatactcactattgattaatccacttaccaaatttttgttgagtgcctgctatgtgccaagcattgtattgctgctggagtacacaggtggacaaaccagacgtggttcttgcccttaagaagctcagcctttggctgggtgcgatggctcgtgcctgtaatcccaacactttgggaagccaaggcgggtggatcacataaggccaggagcttgagaccagcctggccaacatactgaaaccccatctctactgaaaaatacaaaaattaaccaggcgtggtggcacactcctgtaatcccagatattcgagaggctgaggcatgagaatcacttgaaccaaggaggtagaggttgcaatgagctgagattgcgccactgcactccaacctgggcaacagagtgagactctgtctcaagaaaaaaaaaaaaaaagttcagcctttaatggaagagtcagacaaataaacaaaatacataaaataattatgttttatgtggccagttatgaaaaataaactagatattgaggtaaggatgaaatggaagtacatagggggtgagaaataactgtcaggaggaaggaaaaggcctgggatgagtaaaggggaagaacattttagaggaaaaaaactcatgttaaagacctcaggcctaaaataaattggtgttttagaggctagagaacaatgcccatgagtctatagcagagtgagtgagggggtgagtgtgtcctaactggcagaagtcctctaaggatttttggatctattgtcaaggacagtatatcaaatggtagatgttgactgtttgcagagcgctcaggaagctttacatcattatccacagcaagaggtctgagcttgagtgtggtcctcccactgcacatgtaatctcagatactacatgttctaccttgctgagtaatagtaagtagaatggaatgttggactttatctaaaatgtgggagtaaaacaagtacatgtgaaactgcagagcttatcattctggtccaggtatcatgaggaaaggagaaaaccatggttgggagcggccatccacacccaactagtatttggaactggaggctacagagaattctgctactgaggtctacaatgttatttgccctttctgctccttgatctttcactgcataaaccatctgggaagtgtcctttatggttgtcattaaaatgctgccagattccagtattgagaccatagggaatgcagtagtgtgcgtgtgtgtgtttgtgagtgtgtatgtgtgtgtgccatccatgtgtgggtagatgagatgctgatgggaaccggatatactaatgtattcaggggttcttaactaggtgtccaatgtaaacttggttgagaaaaaaattataccttccttttcattatcctctccaactgaaatttaacatttcaatgatatatttaagtaacaaaccacagtattttttgcagtacttgtcactttgtcatcaatagaatcacagatattttcatgtcacattatagttgttccaagtatctcaaaatattacttatgcttaccactacttcaaaattatggtagttatcggctggatgcggtggctcacgtctgtaatcccagcactttgggaggccgaggcgggtggctcatgaggtcaggagattgagaccatcctggctatggtgataccccgtctctactaaaaatacaaaaaattagctcggcgtggtggcggggcctgttgtcccagctacttgggaggctgaggcaggagaatggcatgaacctgggtggtggagcttgcagtgagccgagattgtgccactgtactccagcctgggcaacagagcgagactctgtctcaaaaaaaaaaaattatggtagttatcataccatagctagatttaatatgttaatgaagcatatttattactatatcatgaacatttgtttttaaaaaaatatttgaaaactacatttcaaaactttcagttttctttgcaatccaatgtattttattttatgcatttcaaaacatgattgtgagaaggggtctttaggcttccagaccaccaaaggggtccctgacacaaaaaaggttaagagctgtcagacttattggacatagtcttgccaggtggatgtaagaggaatgttggggacaaaatgcccgcatatccactttcatatgagactttttttgcatactgactgagtagaaaaagggaaaaggcaataagtacttaacctcatgcttgcacagaaacacatacataactttgtccagcttgtagactgaatttctgagaaataaaaagacagtaatagatctagagagcttagagagagatctgcgagaacaaacccacaatcttgggtacatattgtgcatttccataaaccttccctaagtagagatctgggaaaagaatggacataattttctcgaaactctgacctctaggacctggagaaagtccattcagccagccagagccctccctattcccttgggcggtagcctcagagtcctctgggacaacatctgcaagcggaatgcaaatcactagcctgtctgccacccctcattgctcagcaccttatggttgctatttttaggaagtccgaatttctcaatagagacacagcatcaccagcaagccctgagaagttagccttgtttcccaaatgtctgagggtggacccagagtaaacactccaccttcactcccttctgctgaaattaaaatgcttctatttctgcagcttgaagggaggaaagagagagggaagaagaaatgtttgttcatttcttcaggtattttagaaattgaacttgcaagcagggtctgtctccagttaatcaaataaaaattcttcttagtatcacaagacaatttaaaactagaaaaactcagaaactgcatctgacaaaggtctaatgcccagaatctataaggaacttaaataattcaacaagcaaaaaagaaacaaccccattacaaattgggcaaaggacagagacttctcaaaagaagacgtacatgcagcaaacaagcatataaaaaatcctcaacatccctaatcatcagagaaatgcaaatcaaaccactatgagatgccatctcacatcagtcaaaatggctattattaacaagtcaaaaaataacagatgttggcaaagtggcagagaaaagggaacacatacactggtggcaaatgaggccattcactcacccccatcctccacttcccaccctccaccacacaaaccgaacgatggtttctgataatgcccctttcactcattcacacagtctggcggaagctcattctgaagtgatggtttaatcgcaaagagcaagaagccagagtcaaagaatccatcagcttttccaagattacaatcttagactggaaggattgtgtttgaatccttttctgctacttactagatctttccatctatcaaatggaataataataattactcctatacagtagttctgtgagataacatgtgtgaattgaaaagtgcctgatcaacgctagttaatgtataactgctataacttctgttttcctagacaagtgtgatagtctcaaaggaagcttgctcctgtttaatgaatgctaaagtattatctggcgtcctagggccatttctcattgcctcgtttttttctcctgcaaattatcctctactgcttatgtcttcagtctttctccctctgcctcctgctgccacctgctcccaccttggggacctgcctccctgcagaaagcaagtgtcctgctctgggccatgtggtagcttagtggtaaagactctctccctggaggtgggacctgtggtttctgggcaagaactgtgatgggtgggtaggtctgcctaataattctggggtgcttgttgtgactgcacggctcagccacgttctcgggtagccctctatcagcgatattttcctctctgtctgcctgactcctttgtctttcttggtctgtcttataggatttagaactgaattagcaagtaggaaggagtaatttattagccacctcgaactccaacaatggaaaaatgccaagatttaagggacaggtggggaagagctgcctgcaatctgatctgggttcatggctttattctcaccctgacctgggagtcccaggagtaccatctcctatgcgcctcctccccttcctatgctcccattgaactgatatgaagtttcagaagtcctgttcaacacagtgagtcagacagctgatttcaatctgttggagctgctgtaagagattcaacctatttgaaatcctggctttcatatgctgctgcctcttagatctgtcctggcaacccagacctgtgtgctgacccatatcgtgagggttcctcattgctctcagtacgaagagcaaactgcttagcaaggcataaaaggtcctttgtcactggcctcaactacctgtcacctcctgggcccttcctcagtgtcctttctgttccagccacactgagctccttgtggttggttcccttagcaagccatgcactttaaaacttttccaagtagtgtatactttacttggaagggaaggccctctcttcgccatgctgatctggccagttttcgttatcctccaactcagcacctctggccagagaagcctcttcaggcaaattagggccttcttactgccttagtctctcctggcatcatggtgtagagcaacacctgctgtgtcatagtcactgaacacaggtttttaggtaagcaagtgcagtttcaaggccattataggccttcctactctcatttttttctgcctagaggccagttacacaattccaattttccagaagagttctataacaatctgacatagcaaagctgggtgaatttcatacaatgaacaacagtgcaagaggtcaacctagattagattcctgaaagggatgagatttccttgtgtttccactattgattctggcccctcaatgaagagaatgatgagccaagtaccagtcattccaaatctgagccatctgtaatataatggaagctaaattctgtaagaacaagtttagcctggaattttcctcaagataatgtatacatgacatcatatgcactgcggtgttaatgggtgtttctggatggattctcagacaaatattagatttgtttggaccttgtcttgggctgtagcctctttacttttgctctttaccttactattggatatcttgcaacatctcagattcaggtatttttttctccccaagttcctttatttttcctccaatatttctaggagaaagcacacagtcttcagttttatcgcctgtacctatgagaggttaataaaggctttgtgtgtgtgtatatattaagatatggaagtatagtcacttagggagaaagaaaattactgctttttctaaaacttaaaggaaaaattaaggcttaaaaacctgggatgcttttagctttgtgctatatctagcatctaacaaatgcttgataaagtttggccataattgttatcataattattaatactattaatagtaatgataggatttggtacatgaaaacaggttgtatttatgccaatgccaaaaagcaagtgtggggagtatactctgctggccctaagttccccataggaagtagagattgcatatattagctggaactcgcccaagctacttttgggacaaacaggataatgtgttcggaacagaggtcaacagctgttactcttctgtgacattccggagatgtggacagatgtattcagattgaccttccttatttagtgagtgtgggaactggtgggaaggggtagggggaagggagatacagcgagggggaggatgagaaggttcccatgggggcctggtaacatgagagaccactgagagcaatgttgaagttaacagttctatttcctggaggtgctgtactaaacaacatgttaggggaggaaggcccttaaaattgttccgaaaggaggaaaaccaagcctgacagttttcccaaggctaggacaagattgcagttcctgaaggggtcagaggttgcttccttaccattccactgattgcacagtagggaatcagagagggtcaaatcaggttcaatacaagatgtggagtgaaatacattccttaccttgccctctcaaccctggtcatatttaatgaacattcctgtttccagaaaatatccaagtgtcctagtggcttcaaaaaaataaaaaaaaatcagccaaacacagaactgttgatacctttgtggaatgtcagcaacaaggcaggtagctggtcttcagtgaacccaaaaaaagcatggctcagtgagaccattagatcttcagaatcacaggatttttgagaagtgtagatttccctaataccaatctctttgggttctgagacttataagtttaccctgtcatgataatttagatggaatatgattggtgatagtatccccccacctttaatgatggcaattgactttttttttttttttttttttttgagacggagtctcgctctgtcgcccaggctggaatgcagtggcgtgatcttggctcactgcaagctctgcctcccaggttcacaccattctcctgcctcagcctccgaagtagctgggactataggtgcccgccaccatgcctggctaattttatgtattttttagtagagacggcatttcaccatgttagccaggatagtctcgatctcctgacctcgtgatcctcccacctcggtctcccaaagtgctgggattataggagtgagccgctgcgctggccgcaattgactttttttatatctgtcattccctctctgctttttttcagatgatcaagtgagtgggccttttgtcatggaggtgtcctgaagctcagatcagcactgcctgggttcatgatgtatctctcttgctgacagtacacaaattcatggtctggtcaggatcaatttctccagatgatgtcacaactacacaagttttgcatcttctattgtctggatctacgtgaatataaagtcagcagggaaataataagaaccgcatcatatcctggagtaaaggaagactttgcaagtcacacatagacttctagctgaatctttataaagttggtggctgaaggtcagatttgtttattcagaaggtacatttctctgtaaaaaccttgctcttaacctctgtactatctatcaatcacatgatcaagctgctagtttgtcaggaccgtgtctatctttcacatgatactcaaatctagagttccattttttgagtcaaagttgagttcaaatctcttcttttctacttgctgtatcattgtggacaaattacttaagttttataggattagatttgcttgtctgtaaaatggagataatagtagtaccaactccctatgttgttatcaggattaaatgagataatgcatgcataatgcttagcacagtacttgggggcaggatgcctctaataaatgatagctgttgcttttataacttgtagtaataggcctgtctgtctaagtgatcaaaaggtttttaagtaattgttttaagctacttttaaccacatttttcatgtaacaccttatttttcatgtaatccttgataaagcctcttggatttttcctgcaaatatgtctttttgcaatatttgtttattcagtgggattagtcaatcaatatggccattatttctgatttttctttctctgaggcttagcatagtgtttttttttttttttcaggcttcggtcctgctgatttgtgataatatgcatgactttcttaacttcatctttgtctatttttttttgacaaagtttttcgtagcaacagctggaataataccacacagctcaaacagaaagtctcaggcttcattatttccccacaatcaccatgtgacaattcgaatctctgtaaggcagagctttgggggaagattagaaactgaaatgaaaggcaaatttctagctggaatttagatcaaagaagatattatcctggtaggcttgctgtgtacaagagagagccatggggcttctcactgaccagcttgaccacaataattcttaaagactcttcaatgatactttgcagtttatactggtatatgttattaaaggattgtacatcaaggaggaatactatgctaatgtaaaaatcgggttctggtggcattcatgctgtagagtaaaatcaatccacataaatatattgaacctatattcaaggatccattctggctgttccaacaaagatttattgagcccctacagtaagtgtgaaatggagattcatcaaactttctttgtgtcttaaaagcaaggggagatttacactttgtgtgagatatggacaatatattgagtgaggtattgtcatccctattttacacatgaggaattgaggctgtgactttatgagattattatataactagaaagtggtccaactacatttgatccctaaatctgtgggacttcaaatctgtgtgttagctactggaattcccaagtcagttacctttcctgttctgcattctagatggtaaactgagtatgggtatgcattctgtgcagggagctcctcatctctcaaggtctagatgggaaccacagaggccccaggggaaagaggagggagatgctgagtggctaggcatgactctggccttggctgtaggagaaatgagttgtgaaggtgttaggtctttgagtcttctgtatcattgagcacagctcagacagaaatatagggtagagaacagacaggaatatatatgtcctagctagtggcaaaatgctattttcagcaacactatatctagtattatatccttgggaaaccagggatgagaagattaccatggccagagtaccagagagaaaaaggttcacaattgcaggcatattgattggaggtcagagagcaatggtggagtgtttcattccttcagtaaatgccttattgagcccttactatgagctagacacaggggatacagctggaaatgagagagacatggattcaccctcatcatgtttatagtctactggaggacatagacattaaacacttaatggcacgaacacatctgtagttactttttcttcttggcattcccagtgcgctgtataaagagtgcaatggagattatagcagggagacctggtttagatgggtcagaagtggggagtgtgtgtgtgtgtgtgtgtagccaatggtggctggagacagtatctttgaagaggttctgtttactttgatcctggaagaatgagggcaatttactcggattggagataaaaatcctgaccagagagcaataagtggtgaaggccctgagattcattcctcactcaactccctcacaggatcttattttcagccttagttcctgttacgtttcaaacagcctatagaatttggtcacctgtattatatttttctctaacaagcaatgtggtcgggacttcaatctgctcattgattgattaaagttgtttgtttcatcgtgatgcatatgtccttgaatatcaagggcttatgtggatttaacaaatctggaatttctccagaaaaatacaggtgcacttctatgaagcacagttaattatgacttcccagagccgtttgggccactccacggtttcctaagtgactccatttaagctctaaagagatacaccatgttagatgtcttgcaactgaaaggtaatgaatacccttatgtttttgtcctcataactcttaaaattaaaaaaaatatatacttaggagaaacaaatacaggtttcttttttttttttgagatggagtttcactcttgttgcccaggctggaatgcaatggcgcaatctcggctcaccacaacctccgcctcccaggttcaagtgattctcctgcctcagcctccctagtagctgggattacaggcatgtgccaccacgcttggctaattttgtatttttagtagagatggtgtttctccatgttggtcaggctggtctagaactcccgacctcaggtgatctgcctgcctcagcctcccaaagtgctgggattacaggcatgagccactgtgcccggccacatacaggtttcttacatgcatatattgcatggtggtgaagtctgggcttttagtgtacccaccacccaaatagtgagcattgtaccccataggtaacttttcaaccctcacctgcctcccacctcccaccttttggtgtctctaatgtctattatttcactctgtatgtccacgtgtacattgtttagcttcctcttttaagtgagaacatgtgtgtttgactttctgtttatgagttatttcactaaggataatgacctccagttccatccatgttgctgcaaatgatttcattatttttttggctctgtattattccatggtatgtgtgtatgcattgctgcaaatgatttcattatttttttggctctgtattattccatggtatgtgtgtatgcgtatgtgtatgtgtgtgtgtgtatacattatacaccttttgtacgtgtgtgtgtgtgtgtgtgtgtgtgtatatatatatatatacctccaatgtatagctatagcccatattctttattcaatcctctgttgatggactcttgtgttgattccatatctttgccactgtgaatagtgctgtgctaaacatacgagggcaggtatctttttgacgtaatgatttctttccctttgggtatatacccagttgtgggagtgctggattgaatgctagttctatttttagttctttgagaaatctccatactattttccataaaggctgtactaatttacattcccaccagtggtatacaggcattctcttttctcctcatgattattggctgtttttagactgtttattaatagccattctgactagtgtaagatggtatctcactgtggttttaatttgcatttctctgatgatcagcaatattgagcattttttcatatgtttgttagccacttgtatgtcttgttttgaaaaatgtctgtttaacaagcaaatgctgagggattttgtcactaccaggcctgccttacaagagctcctgaaagaagcactaaatatggaaaggaaaaactggtaccagccactgcaaaaacacaccaaaatataaagtcaccatgaagaaactgcattaactaatatgcagaataaccagctagcatcatgatgacaggatcaaattcacacataacagtattaaccttaaacgtaaatgggctaatgccccacttaaaagacacagactggaaaactggataaagagtcaagatccatcggtgtgctgtattcaggagacccatctcacatgcaaagacacataggctcaaaataaagggatggaggagtatttaccaagcaaatggaaagcaaaaaaaagcaggaattgcaatcctagtctgtgataaaacagactttaaaccaacaaagatcaaaaaagacaaataagggcattacataatggtaaagtgatcgatgcaacaagaagagctaactatcctaaatatatgtgccctgaaaacaggagcacccagattcataaaacaagctcttagagacctacaaagagacttatattcccacacagtaatagtgggagactttaacaccccactgtcaatattagacagatcaacaagacagaaaattaacaaggatattcaggagttgaactcagctctgaaccaagtggacctaatagacatctacagaactctccatcccaaatcgatagaatatacattctttttagcactgcatagcacttattctaaaatcgaccacataattggaagtaaaacactccttggcaaatgaaaaaggacggaaatcataacaaacagtctctcagaccacagtgcaatcaaattagaactcaggattaagaaacgctcaaaactgtgcaactgcacggaaactgaacaacctgctcctgaatgactactgggtgataacgaaattaaggcagaaataaagaagttctttgaaatcaatgagaacaaagacacaacgtaccagaatctccgggacacagttaagcagagttaagagggaagtttatagcactaaatacccatatcagaaagcaggaaagatctgaaattgacaccctaacatcaaaagtaaagtaaatagagaagcaagagcaaacaaattcaaaagctagcagaagacaataaataactaagatcagagcagaactgaaggagatagagacatgaaaagcccttcagaaattcagtgaatccaggagctggtgttttgaaaagattaacaaaatagatagaccactagccagactaataaagaagaaaagagagaagaatcaaatagacacaataaaaaatgatgaaggggatatcaccactgatcccacagaaatacaaactaccatcagaaaatactataaacacctctatgcggccgggtgcagtggctcacgcctgtaatctcagcactttaggaggccaaggcgggcggatcatgaggtcaggaggttgagaccatcctggctaacatggtgaaactccatctctattaaaaacacaaaaaattagccgggcatggtggcaggcgcctgtagtcccagctgctcgggaggctgaggcaggagaatggtgtgaacctgggaggcggagtttgcagtgagccgagattgcgccactgcactccagcctgggcgacagagcgagactccgtctaaaaaagaaaaaaaaaaccaaaacacctctatgcaaataaactagaaaatctagaagaaatggataaattcctggacacatacaccctcccaagactaaaccatggagaagtcaaatctctgaatagaccaataacaagttctgaaatggaggcagtaattaataccctatcaaccagaaaaagcccaggaccagacagagtcacagctgaattctaccagaggtacaaagaggagctggtaccatttcttctgaaactattccaaaaattagaaaaagagggattcctccctaactcattttatgaggccagcatcatcctgataccaaactctggcagagacacaacaaaaaaagaaaatttcaggcgaatatccttgatgaacattgatgccaaaatcctcaataaaatactggcaaaccgaatccagcagcacatcagaaagcttatccaccatgatcaagtcgacttcatccttagcatgcaaggctggttcaacatacacaaatcaataaatgtaatccatcacataaacagaaccaatgacaaaaaccacatgattatctcaaaagatgtggaaaaagctttgataaaattcaacaccgcttcatgctaaaaactctcagtaaactaggtgttgatgaaacatatctcaaaataataagagctatttatgacaaacccatagccaatatcatactgaatgggcaaaagctggaagcattccctttaaaaaccagcacaagacaaggatgccctctttcacactcctattcaacatagtactggaacttctggccagggcaatcaggcaagagaaagaaataaagcgtattcaaataggaagagaggaagtcaaattgtctttgtttgcagttgacatgactgtatatttagaaaacctatctgtatttttagaatgctgtatatttagactgtatatttagaaaaccatctcatgccagttagaatggcgattattgaaaagtcaggaaacaacagatgctggcgaggctgtggagaaataggaactcttttacaccattggtgggaatgtaaattagttcaaccattgtagaagacagtgtgtcaattcctcaaggatctagaaccagaaataccatttgacccagcaatcccattactgggtatatacccaaacgattataaatcattctactataaagacatgcacacgtatgtttattggagcactatttacaacagcaaagacttggaaccaacccaaatgcccatcaatgatagactggataaacaaaatatggcacatatatgggctgggtgtagtggcttacgcctgtaatcccagcactttgggaggccaaggcaggtggatcacctgatgttgggagttcgagaccagccagaccaacatggagaaaccccatctctactaaaaatacaaaaattagctgggcctggtggtgcatgcctgtaatcccagctacctgggaggctgaggcaggagaattgcttgaacctgggaggcagaagttgcagtgagccaagatcgtgccattgtactctagcctgggcaacaagagcgaaactctgtctcaaaaaataaaaaaataaaattaaattaaattaaaaaaaagaaaatatggcacatatatactatggaatactatgcagccataaaaagaatgagttcatatccatcgtctcagcccaaaaactccttctgataagcaacttcagcaaagtctcaggatacaaaatcaataggcaaaaatcacaagcattcctatacaccaataatagacaagtagagagccaaatcatgagtgaactcccattcacaattgctacaaagaaaataagatacttaggaatacagcttacaagggatgtgaaggacctcttcaaggagaactacaaaccactgctcaaggaaataagagaggacacaaacaaatggaaaaacattccatgctcatgaataggaagaatcagtaccatgagattggccatatggcccaaagtaacttatagattcaatactattaccatcaagctaccattgactttctttgcagaattagaaaaaactactttaaatttcatatggaaccaaaaaagagcctatatagccaagagaatcctaagcaaaaacaacaaagctggaggcatcctgctacctgacttcaaactgtactataaggctacagtaaccaaaacagcatggtactggtaccaaaacagatatatagaccaatggaacgaaacagagacctcagaaataacaccacacgtctacaaccatctgatctttgacaaacctgacaaaaacaagcaatggggaaaggattccctatttaataaatggtgctgggaaaactggctagccatatgcagaaaacttaaactggtccccttccttatagcttatacaaaaattaacttaagatggattaaagatttaaatgtaaaacctaaaaccataaaaaccctagaagcaaaccaaggcaataccattcaggacataggcatgggcaaagacttcatgactaaaacaccaaaagcaatcacaacaaaagccaaaattgacaaatgagatctaattaaaactaaagagcttctgcacagcaaaagaaactaccatgagtgaataagcaaactacagaatgggagaaatttttgcaatctatccatctgacaaacgtctaatatccagaatctgtaaggaacttaaacaaatttacaagaaaaaaacaaccccataaaaagtgggcaaaggatacgaacagacacttctcaaaagaagacatttctgcagccaacaaacatgaaaaaaagctcatcatcactgatcattagagaaatgcaaatcaaaaccacaatgagataccgtctcacgctggttagaatggcaattattaaaaagtcaggaaacaacggatgctggcgaggctgtggagaaataggaactcttttacgctgttggtgggagtgtaaattagttcaaccattgtggaagacagtgtgtcgattcctcaaggatctagaaccagaaataccatttgacccagcaatcccattactgggtatatacccaaaggattataaatcattctactgtaaagacatgcacacgtatgcttattgcagcactatttacaacagcaaaaacttagaaccaacccaaatgcccatcaatgatagactagataaagaaaatatggcacgtatatactatggaacactatgcagccataaaaaagtatgagttcatgtcctttgcagggacatggatgaagctggaagccatcattctcagcaaactaacacaggagcagaaaaccaaacaccacatgttctcactcataagtgggagttgaacaatgagaacacatggacacagggagggtaacatcacacactgtgacctgtcagggggtggggatcaaggggagggagagcattaggacaaatacctaatacatatggggcttaaaacctagatgatgggttaataggtgcagcaaaccaccatggcacacgtatacctttgtaacaaacctgcacgttctgcacatgtatcccagaacttgaagtaaatttaaaaaaacaaaaagaaagaaaaatgtctgttcatgtcctctgcctactttttaatgggattgtttttttcttgttgagttgtttcagttccatgtagattctggttattagccttttgtcagatgtttagtttgcaaatatttttcccattctatagttatctacttactctgttgattgtttcttttgctgtgcagaagctttttagtttatttaagtcccatgtgtctattttgttgcctttgcttctgaggacttgttcataaattctttgcctcggcagatgtaaaaaagagttttttcttggttttcttctgggatttttatagtttcaggtcttacatttagggctttaatgcatattatgttaatttttgtatatggtgagaggtatgggccccgtttcattcttctgcatatagctagccaattttcccagcaccatttattgaatagggagtcctctccccagcatatatttttgttaactttgttgaagatcagttggttgtagatatgtggctttatctctgggttctctattctgttccattgttctatgtatctatttttatactagtaccatgctgttttggttactatagttttaccatgtaatttgaagttaggtaatgtgatacttcaaagctttgttctttttgcttaggattgctttgactattcagctctttttggattccacacgatttttaggattgctttttcaaattctgtgaaaaatgacattcttttgttctgacaattcttaaccccacttcagaccagttttctcatctgtaaaatggagataataataatcttcctcacaggttgtgtattaaatgagatctggaatgtaaagttcttagtatggaaatgctattatttttactgaaaatgttgtagggtctcagtatcctgtgtattgccggatttaaggtccttattttatttctgtcatttctacctcttggtatatgtgaatgctattggatttcaaaagcaaatgtgaaaggattctaatgaaatggtttgcttctttagtgtcatacatgttaaaacataggaaggcaaatgtcaaagtttgtgtttctttttattctatggaaagaaaattaaatatggctcatcaaataataaggccaataatatttaattattgttttgtgaattcgtataaatgagctgacctctctgggctgcagcttccttctctgcaagataagggaattaggccagatgagtgaactgtttctttttcagctaagtttgacccgattactactatttacatagtattaactagatgctatgtagtcatctttaatatgcttgaagacagttattaactcactccttagccttttgttgttgatcatggaaaactactgggtatctttgtttcttctgtgtatattctcagtatgtataatgagtctcagagcctcttgttttaagatctgggtaggctggtggctctagaatatggatgaccttttaggaaaggtcaccttgccatctgtaaattttcccccagatagacttcaggccctggggaaggcatgggttcccctaactggatagaggatcagagccaggaagactgtgtcaaattctagaagtgaatcttctccaggactcagggcatagctttgtcacttacctatagttcagaagtgtgagtgaatcatttccaaggacaaatttctccaaaggaccaaaagatgtgttagtaagaggggttcacaaagactgtgtttgtgggaaaattgaagtgtgaacaaagaaggtctaccaggacaggaaatacttttgatctgtcatttatcagatcaggagggagggacatgaagcctgcctcctcttacagctaggtcatcaaagagtttgactgtagcattttaaaatagcgaagaaaaaaaggtaacaacactaggggtttgttaaacaatttatgatataattagagaatggaatattatgcatcaattacaaataatgtttataaagatacttaaatgacatgggaaaatgttcaagatataacaaataatagtacatatctgatgaaaactataagtaaaacatgatattaaacatgtaaaaatcttaacagaccaacaggtggaaggcagtggaccagaatattagcagtgtttatattagggtggtaagaatgtggatgaatcttgttttaatgcttataatttttctaaacattctcaatgaaatatgccttacttttatagtcagaataaaaagcaatacaagttatcttttaaaacaacccacatacacaaaacccccaactagagtaattgcacaaagcttagattatcaaaaagaagaaaaaaattactggaaaagttttgaagaagtcattgagtacaagatactgacgtaggtgccggaagaagagagcagttggccgtgctggtggaataaccctctctgcaaagggcctgggagttgaagaagggtgcagtcgggtggtggttatgaatctcagaaatcctgccacggagcctccttttgtgccctattacttaaccttgagggacatagagagcatgagacaccaaggggcttttggttgccttactgtcccactaagaacatagaatgttgttttgactttccctttgcttagggaacctcccccagatactcagctggctggctgcttgcacgtagaatgggttttgcaaagttcctagaagtgagttggaggaggcttgacataaatcaagcactgtgtgctaaatgctccagagggctaccttatgtcctacacaaatgttacatttctaatatttgtaactcctttaaacgtttatgcagatgtttcccaattcctcagtagaattcttaccattatctttttgacacaacctgtccccatcctatgaaaatctctcctctgctagagactttattctttctttctctctctcccccttccttccttccctccctccctctttctttctttccatctttctttctttctttctttctttctttctttctttctttctttctttctttctttctctttctttctttcttttctttctttctttctttctctttctctctctttctttcttcctttcttttttctctctccccttccttccttctttccttcttttcttttcttttcttttcttttctttctctctttctttctgtctttcttttctcattctgttgccctggctggagtgcagtggcatgatctcggctcatagcagcctccacctcctgggttcaagcgattctcctgccttagcctccctagtagctgggattacaggtacccaccatgatgcctggctaattttttgtattttcaatggagacggggtttcaccatgttggccaggctcgtcttgacctcctggcctcaaatgatccacccactttggcctcccaaattgctggcattacaggcgtgagccactgcacccggcctgttccttcttaagaacactttgtctcccctttaatctctgctggatttcaagcaccccttttacacaactcttgatatccatcaataaagaataattcccataagcccatcatgtagtgaccgactatttttcagtgacaaaaaaaaagtctttaaaaatagaagtaaaagtctaaagtcatcaaaacaacgttatatcctgtgtgaaatgctgcagtcaggatgccttgtggtttgagtgccttgatcatgtgccctaaggggatggtggcggtggtggtggccgtggatgacggagactctcaggccttggcaggtgcgtctttcagttcccctcacacttcgggttcctcggggaggaggggctggaaccctagcccatcgtcaggacaaagatgctcaggctgctcttggctctcaacttattcccttcaattcaagtaacaggtaaacaatgttaatgtctttctttctgtaaatattttttgaggtcttccaattggcttagtttattttaaatttctaacaatgtgtgaaatttgaacatttgaagtgtagttttgctgtaatagggcaatgtgttattttgaaaatcattgattctcagactacaatatagtatcttaacaaaagtcccttggaaataaattttctaagctattagtttctctagctattagttgatagtgtcccaagaatttattattattattattattttaaattgagatggggtttcactatgttgcccaggctggtctcaaacttctgagctcaagcaatccacctgcctctgcctcccaaagtgctagggttacaggcatgagctaccatgcccggccaataatttttaatttatgtatcgtttctttctttctttctttttttttttaatttaagaaagctgctgtaagtagattggctctggaagctctgaatttaggttgcctatgttcctaacacaggtccaattctcactaggtaagcttaggcttagctattatttaaactctccaaacctcagtttccttaactgtaaagtgggaataataataaacctcacctcaaggtcattgtgaggtaaaatgaaataatccatgcgaagggcttagctcagtcaggcttcaagataaatgtgaactgtaattactctatctacctgaattgaatgagttccaacatgaattctggagtcaccacagaagctgctacaacaccaatattaataaattagttttcttttacaatcggccaaaatgtattttcttagattaaaattctttaagttcccaatgacgatgatgaggaggataatacatctagcactttgagcagcacacagttctcgtaactagaaggtaggtattacagttaacttcatttcagatgaagagactgaggggtaggcacattaagggatttgcccaaggatgtacaggtggcagctataggaggcagggtctgaaccaccttagtctgactccagtgccggtgttgttgattattatgctattccatctaacatggtgtgatttgtaatttcatggactcaggtaaatccagggttaaattaacttcggaaaatcacaagcacaattcctaacagaaagaatttgttacttgggtgggctggagtaagatgctcattcaacgtgttctcagagttagaaaaaggcccccgcttggttcaaaaactggactgataggggtcaacagtcatgcttaaataaggacagttatttttccctgaaagatacattgaaaagccagtatcctcaattttctttcttattttggcagtacagagactgcattatttgttgttattcttaaacattaagtgtacatagcccaaagagtataatttcccaatctgcagaggtacagtagttgcatatatacccgtttattttatggtctgacgtaccagtgagcacaaattgtgtatatttataaaacgtgttgatataatgaaagacatgagttggcaatgagatctggtaccaagcgtttacagctaccaaatatattctacaagaatctttaacatttattttaaaaaggtcaaaccttatttttaagagatctctcaaacttaaagaatatttaaaattacttaatttgttagacagtcaagggaagcctaccctgactgaaaactatttaaaattggtaattgtacactaaatacttttctgatgtgctttgtggacacctatctgtcatcaacttattcactctcttttgaagagtttttggtaagactcaaaactttgtatgttttctttagaacatttattaaaaggggactagctagataagtggttggagagttcacacacatagggcctttgttttctactttgacatatatttacttttcaaatgccaattcacttttctagtaacttttagcatttgatactgagtggctatctaatgaagaaggaaagagatgggagtgaaggggacacttttacagtcttttccagtaagaaaacttacgagcaagaaaagaatgaccacataaaaaatgtatgatttggcctggtgtggtggctcacgcctgtaatcgtgggacgctgaggcgggtggatcacttgaggtcaggagttggagacccgtcgggctaacatggtgaaatcccatctctactaaaaatacaaaaaaattagcagggtgtggtggcatgcgcctgtaatcccagctacttgtgaggcttaggcaggagaattgcttaaacccgggacgcggaggttgctgtgaacttagattgcacccctgcactccagcctgggaaacagtctcaaaaaaaaaaaaaaattatgctgcattctaatcaaatagtgcaaagcttcttgtgtgctttgcctttctctgtacacaccttccattaagaaattatagatagggaaattctctggtcaaagtgtaactgtccttcctaggtctgagaaaccactgttatgcctgtgttgagatgtgtatctgtgtgcgtgcatgtgtgtgtatgtatgtatatgaagaatagttcttttttccattaatttaataatgtgtgtgtatgtatgtatatgaagaatagttcttttttccattaatttaataatgtaacttatttgtttacagcatagcttaaaatatttattctataaaggttaagtctaacctgattccttatgagttggatgacagtgtagagagatatttatggctaagttaaagaagtgtgatttaggaagagtgaggaaaccttaacttagataagccctttgcatgttttctactagactcggataattgtgcaactgagatccacagagagtattttgctggactttgggataggagtccagcccagaactacagagccttaagagggaaatgctctgggattgatgatagaaggatggtatgcacaaaatacttgacattggtcacatgtttcaggccatatttgctattttttagcaagcctaatcatccagtgtgaagagaaaaatcagcatattaccacttatttttccatgagatcattccttttcacttctccaaaacttgggcaaaaaactgtcaaaatggccagtttggacaaagctaatttctccagcgccttcccttagcgcttatttttctgagagaggcatggaaagcaggaaaataactgacatttaataaaaagtcatcagcaaagcaattaaaaattttatttgtactctagtcttcagccaatgactcccctgagctggttgtatacggaaagaagtaatttgtttctcacagttaagtgttgctctgagactgggcttgggaaagtaaggtgaaaagatgaatgtcaaaaaatcaacagattgccgtatttacatgacttccaatatgctgtggccagtttttctgttaaaagaaattgactggatgtttttgtcatttcaagtaaatttgatggatatttcaaaagtataggcattgcttaaggatttgttttactctactaccgtgccctagttaacacattgtgttttttaaggcaaccatccagcaaggacgtttacagcaaggactgcaaaattaatatcaatatatcaataccaggaaatggaatgagtcattgccacagatagattagaaatagaaatgaatctgtgattgtaactccaaagctctcacattcaaacttttactatgggtggggagaggatctcgctgcctccccttctttaagacatagaccctcctcctttttaacgtcttatgccttttttcaagggtggagaaatgccatatgattaccatttggcttttatcttgtgtggatatcttcctccaagtatttcctgcaagcagtgtgctgacatttacaaaaggaaaatttttatgccaccaacatcccagaagaaaatttgttgtggtttatcatctctaacacaaaagccctttattaactagtgtaggcattgatgaggatacgcaattcatgtcagacttggttgtctaaaaatcagaggacggacactccttcaaagcacaattgtttcccagcaggtcatggcaagggatagaatcttcttctctttctcatgttggttaaatttttgtttgcctttttcttcaagaaatttattatttatggaacttcacagaggctggaacttttcttctcagtacatagttgagctgagcatctggaaaaattacatctgggtggttttgtgactgactgaatggctctctggttaagctgtgttaagatatctgtgtctcttttacggtgatttatttggccgtttttggccaatgacagggtgttagcaccaaaaacccaaaaccaaaaaaaccaagacaattcactcagagctttgagcctgataattatagcatgagaattggtgcctgaagctggggggaaggtaacccaggccccacagaaaggtggttgcatgcaagtgtctaactttttccttgttaatctcattttgaggactccaaacactagaagagaagtgcactggataggatcaagaactactcagtcatttggtagaggcttggaaaaaagagtttagacttctcactatttcaatgttaatttcaaaggcatgtttatttagtctcgtgtcaccatgcaggttatatgtgcttctgttttcattgctggaagagaacctgcaaggtggtggagaagttcttacttaactttgagctgctcccttatctctgcattaccattactgtcatctttttctttgtcatcatcttcattatcttgggtattgtggctgacaatataaccaggttaatggttcctgatggtatcattcagaattactcactcatagttcactttggcctctgatctaattgtgagcccctttctgcaatatctgaatcacctcattggctcacaatccaccatgtaatctacttgtctttcatgttagacttttcgtgaaagatccacctcctcgaagaagcttctggatacttcagcctttattgtggtcttggaagaggagttctgatggaagtgtatctcaacttaacaaatatttattaaacctctcatattttaatctccatcagagtttcagagaatataaaaagaaatataggccggatatggtgcctcacacctgtaaccccagcactttgggagaccaaggcaggcagatcacctgaggtcagaagtttgagaccagtctggccaatatggtgaaaccccatctctactaaaaatacaaaaattagccaggcgtggtggtacacacctgtagtcccagctactggggaggctgaggtaggagaattgcttgaacctaggaggcagaggttgcagtgagcagagattgtgtcaatgcactccagcctgggtgacagagcgagattccgtctcaacaacaacaaaaaaaagaaatataaaatcagtacacaagtattgtgtagtacaagtaattaggtagttaactgagttctctctgcttttacagcccctatgatttagttgagtaggttatatataataggaggatgtaacatctggaaacagataaataacacttggcagtcactacctcaccatgctatttgatgactaaaggactttggtttgcctacattatttttataatctgaaatgtcctctacacctctcacctgaagaagccttctctgagaccccaaatggcaaagagagggacttccttccctctcaagtttctccaaattattactgtgtattgacacatttattttcttttccactagactatgaactccttgagggcagaatcatgtcttattcatccttctaacctctgtattaggcacaatgctgtaagcatatagttactcaataaatatttgttgaagaaagaaatgaatgaattagtaacaaaatgaggaagcataaaataaatactcgtaagattaatgtagaaaggtaagcctttatggagagttgggaattagactggacagtagacaagatttgaatgaacgttgttattaataataattgctagctaacatttattttgcacttataatgtgccaggtagtgttctgcctggctttccctgtattaagtcatctaatctccaagtcctatgaggtagttactatgattgctatgattatactatttcatagatggggaaactgaagcacagagtgggtagagcatcttgcttatggtcacaaagctactaagtatgtaaatccagatggtcttgctctggggttcatgttcttaccaatgctgtgttgtctcaggaaggaaaaggtggattaataaagaaattaaaccaggaatactgtttcatgttctcagaacagatggcaactctgaatgtgtgaggttatggtgaagcagcggagaatccagctaagcaaaggatagaatactggtaacagaaattcaaactttattttcaagtcattttgaagtaatggcctgggtaagaagaaaatatttcagaatccttatctttggaatgaagctggagttatgggaatggatggctagtcgaaaggagagggcataactgtagaaaaacagagagtggagctgaatctggaaactaactggctctgatgggagtcagctgaaaaggatggttagctagtgaaggagacaaagaaagtggtgagagaggcagggggacacagtgaggctagtggaatgccactaagccaatgagggaaagagtttcaaaaagatagtggttaatagcattaaacataagagggaaaggagtgaataatggcttgggatttggctgaaacgccacctgggacttttgagtttaggcagagacatggagaaggaagataagacttcacaggattaagaaaaagtggagggggacaaaacagagacagtgaaaaggagaggaaatagataaggtaaagacaattaggaacttatatcacctaaaatgtctaccatggtattttgtgcatgtaataataaatgtttgcaaatggctgagtgacttaagtatgtttgacatgtggaaggagccaagtgctggacctgagagagagagagagagggagagagagagagagagagagagacagagagagagagtgtgtgtgtgtgtgtgtagcattgcagggcttgagggtagagaagggtattattaggaaagaaaggaggaggagggagaggaaaaaaagagggtggggatagttttctcaaggagatagggagggagatttgttgcataggagatgagtgtattagagagaggaggacaaatctctaagaagatagggaggaagagaagagacttataggggtagagataagttagaatgaagctatggtagatgagtgattctatactggtgaacctgaggttaaaaacaaacaaatctctcagagtaggtcatgatgttaaacctatatcaacaagggctactgggtaatacatgccttctctctgaagactttgcccatgtgtactttaaattcttgcttgagtcctcaacaatgcacactatggctaggcttgacctcagctcacggctgagatcacagggtcacagggttcaaaccaaccctgcccaacattatgggcgggactctagtttccagtcagggatgttaatcttagcatttccctgtgtgttttggaacaaggatatggttgcttgaccttggcttggggaggccagtccgctattcttttgccctctcttttttcaaactcaaaagctaatcccaaggatttctcaaggtgggggatgtgattaggagtattagtctatcatactgtgacagaacttttctaggcctcggtttcttcatctgatacatgaagagtttgggctggaggatatctcaggtctactttctggcttaaaagtgcttctgaagtggaattttttaaaaagctaacttttgtcgggtctaacaaggcagctcaactaccccatccccttgtggatgctcttatgacctgatagagcaaatacaagaaattagaaaccagccatctctgaaatcccttgcagggattgctaaccaggatcctaaatgctgctaatgtgcttagaaatgactgctggactttgagggggcaatgctgcctttgctatctcctgttttcctatgcaatgttaaggtccaacacagtaattatttaaacttctgggccatgacatttacctggaggttctgtatatgacaaggtgatcctgagcagattcttcagaggtatgtgatttaggcagaatggaacagacaggaaaaatgtactgttgtcttcatcacagagttgttttgaatgagggatcaggataattgtggctcaggaggaaaatatggctctcaaatttggttactagattaaaacatatatttagaaaataataaattaatagaggaggtctctttatacctgtgggttttcttttgatccgttaactgaattactataataatatatatgtacagaaagctataattccctggttacctcctatttagactacaggcaaccttttagaatagtgagatttgattttggggagttgtctggtggctcttggtatgggttccactttcatgtaagttaaggtgctcttgctatgttgtccccttagattgtctttctaacattaggagatcagaggaaaattgcagacctgacctgtgaacggtagggattgggtcacactgcatctgagtttatgttgctttgggttaggaagttttggtcccagagcactcacatcctgcattgctgtgtggtgtctctgagtggtagggatgggttacagcacaggtgatggtttttagcaattttaatattaactgtcatcctaatacatatgaacttcctaatgtacatttctatccccaactggcttcctcgaactctagtcctatacttctaactccttctggatctttcctccaggatgaacaaatttcctcttaacttacctcattttgtcaatggtgcctccactcatacccttacccagtgcgtgaactctgggtcggtttccattcctgttcaccatcagtctgtaaaactgagcaccaatgccttgtttgaccctttcataccagctgccacctccacagctcaggccttatgaactcacatcagtgctattgcatcagcctcctgattggtctctgcctcagttcttcccttgctccaagccaagggcagtcaagattgcttgctgcactcctcaaggctgtgctaaccttcccaaagcagcatgtaccacaacattctcaactcagacatcttcagcatctcccatggcctttctggtaaaatctatgtgccttttcttggctccccatgactggtattggccatcttcacctgtttccatcctacataaatggaatactctgccagttcccaataaactctcacactaaggtcatttccatgatcttagcctgtctaaatttgccccagaccttatggcccagctaaatgtgaagtctctacaaaagcctccagaatcatcctgtctggaaacaaggcttctttcgcgtgcctgtcaatgaccctttaaagggttcatgtaccacggatggcttcggagagtagctgattgtgtacctgccttcggatttctcctagaatgaaacagctctgtcttttacatcttcccatctcctaagaatcaagtacattaagtcccttatttatttgatgaataaatgaatgaatgacgctgtcacagcagaagtcagaataccaaaggacgattctgtgacacatcaaaatttcttctcagaaagtactcattgattgtttttgataacttttccctctcaaaaatgaatgccttaggtcttggtgctcatatgggactttttgctactgaactatctgacctttgacttactttctgacagttacatgtagcacaataatttttttaagaggacaagaacaagtgtcctctacattatagtgtctgcctgtgtaggaacacaaataaaggttaaaggtggggcttagattagtgctgaccaaaagcaacttctttactaaattatttatttatttgagatggggtctcactttgttgctcaggctggagtgcagtggtacaatcaccactcactgcagccttgacctcctgggctcaagtgatcctcccacctcagcctcccaaggagctgggactacaggcacatgccaccacagccaggtacccccacacccagctaatttttgtattttttgtagaaatggggtctcgccatgttgcccaggctggtttccatctcctgggttcaagcgatccacctgtgtcatcctcccaaagtgctaggagtacaggtgtaatccactgtgccaggcctttagtaaatttattaatcaggattctatttctatttatattgttacctataatcatttgtccttgttcaaactaaaacctctttagattttgttttaaaaccatactttctgtcaagaacagttaatgtgcttggtataactgatagttgtgatatacacaatcttggccaaagctggttgcttggtctgcttctcttgatggaagtcattgcttctgtcatggtggcctccactacacaactctcttgccttctggttctggtaacttcgctgtcccctggtctctttcgacctaagggtggtcataattctgctgctgcaagtcacaggctctggcactacccctcgtggttctgctcttgccacacctttgccaacagtcctttcataaataaccttcctactcttgcccaattttgtgtgtgccatctgttttcatttgggatctggaatgagacaacatatagttggcccactgtatccacgggttatgcatctttggattcaatgaaccatggatcaaaaacagtatttgtgggatgcagaatctatggatacagaggaccaacaattgcatgacttgagcttccatggattttggtatctgcaggggtcctggaaccaacaccccatggatccagaggaccactgtatatgcatgtttatcaagcttattcaaagccccctttttctgtgtgaagagattttccttaaatcttcatttcttgtgaaaatgggaagactttcaagataacagtcaacagaaaactagatgaaatgaccacagaattatttttaaaccataacttgcattattatcattattattaccattttttcattttaacatgaatttctgggagagagaggctgggtccattcaaagcatggtaggtcatgaatagctttgtttttatcttcattgcagctcagagaggatggtgaaaggtgctacagtctggtgaatgttttgtacttctctttctcttatcagaaggaagccaggccaccagctaaggttatcagagccatagactgttgagtccccctttcttctcagggagcacggtttgtctcacagtttcctgagcaaccaccgggttgtcttgtgggggagcctaccccttacagagcctgaaaaggagccagtggtcagatggtcacgtgttgaagggcatcctgggcctgaacaggaaatatactcagaggaaagttacagtaacttaactagctctgtggtcaggagggaggtgctcttctatgccagggaaatcagcatcaccttcacagtgtgctcacaaatatcacagggcaaaatggctgaaagtagaagctttcattgtttttggttcctacctaacatgtgaaattctgttcagtccgaatttttaaaaggaaacaagataattagaatcttacaacctgatttttcaactgcaaaagaaagtcagactatgatgtgcataaatggaacctgataaagttcttaaagattctggaggaaaatcacattttgctaattaatcatgtattccagctctctaactgcttctttagcttcccagtacgttttatttctctatggtgctacgataaagaaaaggaaaaactatgacaaacaaatgtaattcacaaaagccctgaagttaaggattttcctagtgaagttcagactgaaatgtgatttcatgtgttgactcatgtctatgttcaatcccttttgtatacttgggtaagctagaatggaagatctcaatggtataattattacttgtgcatcagaaataatttataagattatttgatgtgatcatactgtctgtaagccttatctgggatccatctatgaccttcaggaaatcttcaaaattgtaagcaaaatgttttgtatatgtgcattagaggcaaaaaatttggaaatgtatttttttctagatatgagcatgaaataaattcagtcttgctgaatgaacaaagttgtttttctgtccatttatgatttaaaacattactcctagatgtctaaataaataaattacatcttagctcttccattatttgtgtgaccttgtttgaaaagtcatttacttcttctctttttttccccccaatagcctcttctttaaaataaggaattggcatagatcatctccaagttcccttccagttgagtgtggttttttgcaggataagactctaataaaatagtggggaaaatgaaatgtattttgttctggtcctcttcccattccattcactcccctacttaatggtaatctcctccctaaccctcactccagacatctggtaccatcctccctatcaagtccaactttgagaggatctagaaccaatcactgcaattgtgttgaaattttgatgcaacatggcagaaggaaatgaacaatagattagaagtcataagttatgagcttaaatttcaaggatcacttatgtttcctgtaaccttggacaactcatctacctctttgacctcagtttccccatgtgtaagatgggcataaagatgactgtcctgcctatttacttcacagttgaatatagagttcagatgagataagagacagcattttatagccctgtgaatgtaagccatagatactaaattaagccaatgtgtttcccatattgcattttgggcttcattttctttggaaatctaagcattaactgagctggtgggagggtccttttaaggtcagggttctttgatgctgggagccacaccttagaggtggttaccaccccacctatgcagagggttgacctcattactaaatatggtaattgacccgtttataataggtgtaaacggcaagagttgtttttttttgtaaccaagcttccccaccacccactgccattctcatggaagttcaagcaactttcaattttcctgaagtcggctgtttcacaagattcacagattatctgtgggaaatcttttagctctcagtaccttgctcacaagcagcagataagtaccttctcacctccaatctcactcttcatgttgcctgttgttaagcaggagctgtgagggaaagaggtttgaggttagtgcttcctgtctccacacctttagctggtttagctgctaggaaaggctttgaaaagcaaagcactaaattcaccttcaaaacaacttgtcaattcagttagagaaatgtcagtcagaccaatcttttgataacgtaagcaaagaaaatggatgggttgacaatgtttcttttaacctagtaggtttgacctaggtagaccttacctgaacactcacaagaagtaaaatcaaatattcacagggaaagggctgggtctcctgatacccaagtagcctaagaagaatgccttccactcctagcatgaactggaaagcaaaaagaaatcaaacacaagttaggacgagggagctacatatttgggtttcttctgagtctagatatgtccttacatttgtaatatgtccttacattatttgaagtactgtggattttcagaaactcagagaccgaaaatacatatcaaagccaaatgtcatctgatattctgattatcagctactttgatttctccatgtttttacttcatagagcaaggggtgtgcatttttacacatgccccattttaaaagaaaataagagaaatcagaattattgtgtttactcaaagtcacaatgatcacacatattcagtatcacttagagtcactggttatctttttctagcaccaaaagtaaatttctctcatttactgtcttgcaaagcatatagagattttgaggtcctgtgagatagtttcctatttaggcttctctgaattattgacatgaaccaaggtgggaccaaatgctatgaggatataaatattgagaaacgagattttatcagccaaccttgaactcagcttgaactctaaactaggaggctgttagctacatgttaacacatagtaagcaaacgatttcaagcacagtatctgtgtttgagagccagctaatttaaaaatgatctatgttgacaaagaagagggaggaaagtaaacatgagcaataaattggatggcttttcctcaaatggccttatcgaaaacaaatagttttcaagctcttttccagcaaaatcttagcacttttctgcataaaagccttcagtagatcttcatcaccttcagaagagagcccaagctctctaatggagtgaactatgcttgctctgacaatcttgtcttttgtaactcatggcccagcaaaaagaaggtagctgtaattccccaagtcggccacactcttaccctcctcatctcccttgcccagactactctttttctctctttgtcttatcctccccacagtcccctaactcaccccagcccaaacacacactctcccacctcaccccagtccccaacacaaagacacgtcttagccaggctaacttttacttagtaaaagttggtcaaatccatgtatgcatactccttcaggactcaggtcagccgtcatctcctgagatccttagctggtttccctgttgcccccggaagttttgtgcagatcactgtgtcactatgtttaaagtagggtctatttatatctttcttccccatcagatcatgagctgccgtaggacgggaattgagtggcattcatttttgggaaatcaattcttctctcccatgtgcatcttaggaacatgtcacaccctgagttagacaggacatattcagcaaaccactggactctagatgccacagcttttcttccttcctctctctcccttccctctctccacctcactgtgtgtgctgggagagggagtcaaactggggagccatctggggtttctctccagcccacccacactccctttttttgtctccacaaagaagtcctattctcattcccatctttttctttaaatcagctcacaaaggcagatcaggaagaatttgaatgtgcattaaaacagaatccaaataattagcaatagaaacacaattcccagggcggtgagcaagcagaatacaaatgcctaacctgcactcactctctgaaaaggaggagagatgcaggcattgcttgctggagttggttgctcttccaattagaactgacctaatgactccttctaagtaaaaaaaggaaacaaacaaaataaatcaaaaacaaaaaaacaaattggatgtttgtattaagacaggtcgaactttttgattctttgcatgtttatttttcagtgcttttgcaaaatatttgtggaacaaataataggtgaagttaaagttgttgacacaggtttccaaaaaggatttaatgagatggtagtcaaacctagctgctgataacaacaatacagccgaatcaccatctttcactccacaattattttatgagagtctattagtcatactgtgttatgtaaagaagcataacatgtggtcctttctgtcaagagacttggaaaccaggggcctaagggaaatgcacatgaatccaaagctaagcaaattgaagcatgtgaaacaagagttgtttaaaaggtagaactcaaatgtcaagtgagcgatacagatagtaatcattttgagacctgagaagggagtggtgctctgtgccaaggagttagtagacaaggcatggaggtaggaatgctcacagtctgttcttgggatgttggcttaaatggtctaattaggagggcttcggtttgaggaaatgaggttggaaaaacctgtggaggccgatttgaggataagaagttagttttcctctgttaggccactggttctcaaatttgactgccatctagaattactagagaaacttaaaaaatatgaatggatgcctgggtcctatacctagagattctgatttaattggccttggaaaaccaaaggcttttagatttttccaggtgattctaaatatgttgtcaggtgaattccactaggccatagtggctttcaacccaattgaatattagaatcaagtgggggaacttttaagataatatgaaagacaatccacagaatgagagaaaacatttacaaatcacatatctgataagaaacttgtatcaaggctgaggcaggcagatcatctgaggtcaggagtttgagaccagcctggcccacatggagaaaccccatctctactaaaaatataaaaattagctgggggtggtggtggtcacctccaattccagctactcgggaggctgaggcaggaggattgcttgattctgggtggcagaggctgcagtgagccaagatcatgccactgcactccagcctgggtgacagagtgagactctgtaaaaataaaaaaaaaaaagtataaaaaatgcatacagaactccaataattcaataataaaaagataaatagcctaaccagttaataaatgggcaaatgatctgaatagagagttctctaaaaagaatagaccaatggctaataagcacatgaaaagatgcttagcatcattagttattagagaaatagcaaatcaaaccatgatgagatatcacttcacgtccaccaggatggctataatagaaaagatgaacaataacaagtgtcggcaagggtgaggataaattggagccctcattcactgctggtgagaatgtacaatggtgcagttgctttggcaacagtttgacgattcctcaaaaagttaaacatagagttaccatatgacccagcaattttactgctggcaaatacctaagagagttgaaaacatacgtccacacaaaaatctgtatgcaaatgctcatagtagcattattcataatagccaaaaagtgatgaatagaaaaacaaaatgtagtatagccatacaatggaatattatttggccatgaagagtgaagttctggtgcatgcaacaacatggatgaaacttgaaacatggatgaaacttgaaaacattatgctaagtgaaagaaacgagacacaaaaagccacatatcgtatgattctacttataaaaaaagtccagaataggcaaattcatagggccaaagtagatcagtggtttccagggatttaagggagggaggaagcagggtgatggtaaatgggtatggtatttctttatggagtaatgaaaatgttctggaatcagatagtggtgattcattcataactttgtgaatatactaaaaaatctctgaattttacactttaaaacagcaaactttatagtacctgaattatatctcaataaagttattatctaaaataaagaaaaaaaacttagtatcaatccttccccccagcctagaccaattaaatcagaatttccggaagtgggaggacttgggcacagatattttttcattttaaagttcttgatataaagccagcaatgattttttaaaaagaattttgtagagatgggttctttctatgttgcccaggctggtcttgaactcctgggctcaagcattcatcccgccttggcctcccaaagtgctaggatcacaaaggtgtgagccatcatccccagccagcattattgattatataggagacaaaaagctactattaatttagttctatgccatttccttcttaccaaaaccaaaacaaaacacctgtgtatatgaattcaaattcagttaaattgtaaatttcatttaaaaatgaatctgattttatttggctcttcagtgtgggtatacgggatgttgcttcaaataaacttaaaagaaatgcaagtaggtaaataattattaacataccccaaaacaagagcaaaaaaatgcttttgtttgcattgaaatttgaatcaaagacacaaagtggtttgttgttttagaaaaattcttgagggccaggcgcagtggctcacacctgtaatcccagcactttgggaggccgaggcggtggatcacctgaggttgggagttcgagacaagcctgaccaacatggagaaaccccgtctctactaaaaatagaaaattagccgggcatggtggtgcatacctgttaatcccagctactcgggaggctgaggcaggagaatcacctgaacccagagggcggaggttgcagtcagctgagatcgcaccattgcactccagcctgggcaacaagagcgaaactccgtctccagaaaaaaaaaaaaaaagaaaaattttggaaggtgtcttggttgcaaagttgattcccagtttctcagtgcttcagtggtctatttctcaggtggtcatagccaacttgggttttagttctggctttgctcaccatttgtttggtgacttcagacaaaccagctaatgtttctaggccttatacaatcattagaaaagaaaaaaaaaaagaaataatattgtcctgtgccaacaatgaggataccatgggaaatgagatcaatgtgttctcttcacttatggagttgataaactagtttcaggttctttgcttttaaagattgaactaaatgctctccagattctttgatcttttattgggatagcagtaaaggtagatgatggaccagagagataactcccctctggagtctttcacctttcatgatataagggaatagatctatgaatttcttggggaggctattctctgaatttggtgcagaaaacacattaaagcaaactcttgggttatattttttcttatctcttcatcccactcttgcaatgggcaataaacaaagtaaaaatgtttcaaaatattttaattcctttacaaaaacctgtatcacaacttaaaaacaaatctatttgtaggttgggcatggtggctcatgcttgtaatcccagcactttgggaggccaaggtggtcagatcacttgaggccaggagtttgagaccaggctagccaacatggtgaaaccccgtctatactaaaaaaatagaaaaattagctgggcgtggtggtgcatacctgtaatcccagctacttaagagactgaggcaggagaattgtttgaactcggtgggtggaggttgcagtgagctgagattgcaccactgcacttcagcctgggcaacagagcaagactctgtctcaaaaacaaacaaacaaagaaacagatctatttttgtgtctgtgtcaggcactaaagccacctccaaatatatcactcagtcaggaaattggcccaatgcatgattaatattaatgtctcaggaatatagatttaaaaattgtgagtgcctagctgtggtgctcaatgctaacagaaagccatgtactgccttctgggtgaaaacatgctccattgttccattcaaaagaggatgaaaataatattgaaatgttaacttttgaactctcagtataattatcccctgaagaggtcctacatcttctgccaagagaaaacctttgctggagatctgttcatttagttaattaatatattttgctctcaggaagaaaaattatccttatattcttgttctaagcaaatgatttttttttcccccaggaaacaagattttggtgaagcagtcgcccatgcttgtagcgtacgacaatgcggtcaaccttagctgcaagtattcctacaatctcttctcaagggagttccgggcatcccttcacaaaggactggatagtgctgtggaagtctgtgttgtatatgggaattactcccagcagcttcaggtttactcaaaaacggggttcaactgtgatgggaaattgggcaatgaatcagtgacattctacctccagaatttgtatgttaaccaaacagatatttacttctgcaaaattgaagttatgtatcctcctccttacctagacaatgagaagagcaatggaaccattatccatgtgaaaggtaacatacaactttaccagtgtaccaccctaaagtaatggttttcaaatgcagtcctgaaaactgggttgtggtcagtggtggggttgaataaggcctaagtgatttgatactaacaaagacaaataatgttttcagaaaaatttttccctttactgtagaggagattcaaggttatattttgaatatctttattttcctttgctgacattgagcgggagagtaagtgatgaagttaccgcatgtgggaacagatcatttttctccattccagtggatcatggcagaaaagaggttaccattaaaatgtaagcccaggtgccctcaagtaacagctgggtctaatgggttaagactcaggaagactcacttctatttctaattaattctttttttgtgctccataatcttcctctgtaaaagtacctttccattttctttttccttccttccttccttccttccttccttccttccttttcttttctttttctttttctttttttttgagacggactctcgctctgtcgcccaggctggagtgcagtggcgggatctcagttcactgcaagctctgcctcccgggttcacgtcattctcctgcctcagcctcccgatcagctgggactacagggcccgccaccacgcctggcttattttttgtatatttatttatttatttattttaattaattaatttttttttttgagagggagtcttgctctgtcgcccaggctggaatgcggtggcgcgatctcggctcactgcaagctccgcctcccaggttcatgccattctcctgcctcagcctcctgagtagctgggactacaggtacctgccaccatgcccggctaattttttgtatttttagtagacagggtttcaccttgttagccaggatggtctcgatttcctgacctcgtgacccgcccgtgttggcctcccaaagtgctgggattacaggcgtgagccaccgcgcccagccattttttgtacttttagtagagacggggtttcaccgtgttagcaaggatggtctcaatctcctgacctcgtgatctgcccacctgggcctcccaaagtgctgtgattacaggcgtaagccaccgcgcccagcccgtacctttccattttctaaaatatacaaagaatgctggactagaaaccgggggacataaaatttgctattaatcaactgtgtgatcttggataagtcacctaactttttcatagtcaaaaactcagtacaactgttaagcagtatttgtgaattagtgaaaataagtctactgaacttttgttgatgttatgttctgcctaaatgttagggagaaaaatcatgattccccaactcagaagaatacagtattggtagcaacaagtaaagtttgattttttggtatactttgtggatatatcatagcttttcatttttgtggaatgataataagaaacacatatgttcagttttgtactgaatcctagcataatgccaatgaatggtttttcttcaatgctggaacagagccatgctgatgaaaaataggatactaaataaggaaagaattgttaatgtggcagataagcttttgtgttctggcaaaatagagacaattaatgtgtgaatattttgtttgctgagtcctatttagatttctaatatctgtaatatccaaacagaatattttaattgtatcaagtcaaaggttaaaaaattatgctattttgcttgtagctaagagtgaaatattttttcctatatgaaaggcatgctactttaggatagtattttatatatatgtatacacacatatacacatatcatttatgttagaactgagaaggacaccaatgatcctgtacttagtaattttcaatcctatctgtatattataaatctgagtaggttttaaaagaaataccaatgcctagttccagccctgagattctgatgtaattgatatgggttgaggaaggggtgctggacatcagtatattttcaaactttctcggataatttattgtgcagctaggatggaaaatcaatggactagaggatttttggtatgctttctagttctaattttctctaattttgaatagaattctataggttccttctcatccccttttgattcctaaagatacaaagtgatttgtttgtcattatataatctatgagacagggttggaactagaaatttatcctctgattagcagtccagtgttctgactgccatattaggctgatgattttcttaaggcttgaaaacatgcatattatttaacttattccaaggatgcagtttagggtctagattaactatcttctgatgggagaaacggataaagttaggttaaggccattggaagtcaccgttttgaatcacacagtagaatccacaaagtcaagtgaatacaagtctaccagtgtaccatcctaacgtaatggctttcaactgtggtcgtgaaaactgaccagatcatggtcagtggtggggttgggtaagtctcaaagaggaaatctattcactctaagctggtgatatgtttaatatttttatttctttcacatttttctctgatgttcacaaggaaggaaatgcactcaattgctattcctgtatcatttaatccactctattttgtttttcagggaaacacctttgtccaagtcccctatttcccggaccttctaagcccttttgggtgctggtggtggttggtggagtcctggcttgctatagcttgctagtaacagtggcctttattattttctgggtaagagaagcagcactgcttttatgtaacttttccactgcacatgaaatctgaacacattcaagaattttgcctatgtggtttattttctgtttaatataggatgatgattttcttttccccatgcttgagtaggttctcttttagcttgttcaactctatctgagataaaaatctgatatgagttagatttcccagaaggcattgagtaggtggtgaggcaaaataagaagctaaatgggtaaattagggtggagggattaggagcagttgcctttcttctccccattttgcaatataattatgacacataaaacagttttaatgcgtatatatgtataaacacctaggcaacttgggaagctaggcaactgaagccaatggacaatgttggcttgatcaaaaatcatgagaaacttggctactgaaattgtgtattcaaacctagcaaagaaactagatctgtttatctgagtcatatttttttttctcctctgaagcagttgaattgtgtgaggccaagtatggtgctgtcattatgaaactataatgggagttagaattttctgagctctcaccactgaattgaagtactaacttttgcaaatgtttacgtaataaatgtggtgtatttttctttaccttcctcaacattgaatttttggcctgggtttgaacacattttgatgaacgcacctacagttaagaacgtacccctgagtgacccttgttcttactcagaaacttcttaggtacatagtatggtacagaatgtattgactccatgttgtctttgaatttttttctagaagttacatgcatggatgagtcatttcttcaatgagaaatgtattctcaaacataaaagactatttctcttgatagtctccaaaagactatttctcttgatattctccatttgatattaagtacatttggtgcttaatgaatgcttattggattgatgaattgataacctccagagaggtcaaattaaggatttaaatgagtctgcctgaagtatgatactcatctttaaggcataatctgtatatgtacctaattcatagatgggtcagtgatttctgaaagccatatcatatgaagtcattctgtttactgtcagcttggtgactgcgggtacagacctggatccacagccatgccttcctattatccagtcttagattcttttagactcttcttggcctattgccaaagcttacctttcagttgttccccacatgctccttgcagttcagaagaccctagggctcagatggacatttgtcaggctgcctgttgcttactctgtacttgccgcagggtaggaaacaaagtggttgcttgttcctggaaattctttatactaggtatcatcttaagaatttgcctggcttgccttctgcaagttgcccaaccctgaaggtggggctttggtattgtaaaatgttgcctgaattctgcctctgatgttagttgactactttcacctttccagatcttggtatcttcatccaacttaccttctaactttgatcctctggtgtttgctgataattttcgagtttttagaattcttagttcttgtttcttcttaatctctggccattggcttttatgcctaccatatggcttttcaatcctcttattgggaatctcaactttctaacttaaaggccaggtgcagtggccctttggatacccctccaggaaaggcattcccctgtgatatgctgacctaggtcaaagtaatttactagctctgcagaaagtagttttgggaattactttaaccttcaatggccagaggacactgctcattattgaaaacttattataaatattcattagaatgtcagttactataatgagacatcaatttgttgagtgacttgagtcacccaaagggacaaaagcagcttctcactttcaatgaatttaaaccgttcactttcaactcagacacatcatagacacactgggtttttccttggcagtactactaattcctagtgagattcatcttgctttgttttaaaaaaattttatttttgttttactttgtcttacagaccccctgtgaattgggcagtcctgtcatttgtggcctcttgtagtcaattcggttacccaataaaaactaccacttatctgcatctcaaacctgggtctttgtactctcttaccaaaagagtataaatacaagtttgtctatatttcgtagaataacatagtatttttactctgggctcatcttttcctgctgttggtatttaagcaacaagtaccttgctgagttgggcatctaggccattatggatccctggagtttagctgtttcctgggtaattttctgagatcctatttttggctggtctgcagcgtgccttgatgtaagttgctgttttccggaacttcctgagggcctgatatgctactgtaggcagttctgggttgagtgggtttctaggctgagcgggtttctgggagcagctgcagattctatctcagttcttgacctgatgttgacatttgagtaaataaagagctccctttggtcaagctgtcacaggccagcacctgtcactgtctttcaattctccattcatgcagctgtgctggtaaagctgcccgttttcctaaagaaatctttttaaaaaacattatgttccccactgcagatcataatgtgaggaatgtagatagtgtgtgtacaggtagtgtctgctttttataataatccagtagattcttgaagaccacgtacttaagtagattaccttgcatatgccctgtgtattgctgctgttcccaggaaacaagtgggtaaggctggcatggggagaagggcaaaggaggaatggtccagaaattacatatcattagctgacattcactgttgaaggggtggagatgacacagacacatagggtaggtacttcctgcacacatatgcacacatactcaatgcacatgggtgctgtaggttctgcgtggtgtttgttcccagccatgcatctgtcattttcatcccactgctgtgtttagagttagggtgataataagtaagtctgccatctgacaatcacttgaggataagcatgggagctgactgcaacagacctttcattattttatgtgcaatgtaaagaacctgagaatcaagacacctttattgctgtggcctctctaccagctatgatttggtttgggtgtccggaggcagaggctgacacttggaggtttggcaaagggagtcctcagggttggagtaagtactaaaaatgcttcccaggttatcagctgttttctacactcatctggggacagacatttcctcggcctcacccctgccctgctgtgatcttgtgctcaagacagctctagtctttcatttacagaaaggatgtagaaccaaaacaattcttcattgcattgtaggatgtttagcagcatctctgacctctacccagtagatgccagtagcatccctccccgttgtgatgatccaaaatgtttttagacttcactaaatgtctcctgggacagggattaagggagcttgaggtgtcaaggatgaggttaggaggtctgtcttgggcagctgtatatatggtagtgtcattcactcagatgagaaacactggtaaaaaaaaaacagcatttgggggaaatcttgagttttattttagacatgttgagtttagagtggctttgaggtttagtccagagatataaatttgggtgagtaggtggtaattgaagctgtgaatgtggataagattgcctagggaaagaggatagagaagaaggcctaggaccaagcagtgagaaattctaacggctggttagagaaggatgagcttgcaaaggaggcagggaaggagtgacaagacaggtaggataaaaactgggatgtcatagatggcaaagagaaatagtatcacaaaaagaagagagttatcaatagtatagaatactgctgagagttgaagaagatgaggacttaaaacatgttagctgtgtttagtaacatggaagtcagcgtttttcaaacctttctttagcacttactcatgcccctttgacaaggaaggtgtgaagtgctcaggcaggagtgtatggaaacaaaaccagggctgaaatcattcacttatttattcattcaggtatcatgtcattcatgtacagcattatctacttaggtatcagcctgtgtgccaggaactaggcacttttttcataatagagaattctgaatccagaaatctgatggctttctgtttttagatgttttctgggtcatttgttaagaaatgtagaattttactatcacattgattcagaaatgatgttcctaacccttagtcaaaaattttgctaagattcatggtgggtgaaactattgcccttacttccctcacttctggtggaaattcatcctgatggagccaagcctatgaaagagagatgagtgtagaaatacatacccataaagacataggaatgtactagttgtctagaactgtaaattgccattagtttggactccacctttacaaatttgtgattattacagactctggaggagttgaaagtcctcttcggttaattatggaaaaacagcttgttaagcaaatgctaatgtaagaagatcacaatgtgggtaggcttaacctagtcaaaggaggaagggccttcaagtgtatttacatatcaacagtggatatgttaattagtgtgcatttttaattcaggtcagatgacagcattgagagtaacagggatgcatttctctaaaatactttctttgagatttttcaagttcaatgtgaagagtcagtagttgggtgtgattagtcattacccaagtccaaggtgctcaaaaaaggttagtgttttagtgtctctgtcatttgacagttaatattatgaatagttgtgcccacagtcttagaactccttccatgacattgtccctccatactgacacttctctttcctgcaggtgaggagtaagaggagcaggctcctgcacagtgactacatgaacatgactccccgccgccccgggcccacccgcaagcattaccagccctatgccccaccacgcgacttcgcagcctatcgctcctgacacggacgcctatccagaagccagccggctggcagcccccatctgctcaatatcactgctctggataggaaatgaccgccatctccagccggccacctcaggcccctgttgggccaccaatgccaatttttctcgagtgactagaccaaatatcaagatcattttgagactctgaaatgaagtaaaagagatttcctgtgacaggccaagtcttacagtgccatggcccacattccaacttaccatgtacttagtgacttgactgagaagttagggtagaaaacaaaaagggagtggattctgggagcctcttccctttctcactcacctgcacatctcagtcaagcaaagtgtggtatccacagacattttagttgcagaagaaaggctaggaaatcattccttttggttaaatgggtgtttaatcttttggttagtgggttaaacggggtaagttagagtagggggagggataggaagacatatttaaaaaccattaaaacactgtctcccactcatgaaatgagccacgtagttcctatttaatgctgttttcctttagtttagaaatacatagacattgtcttttatgaattctgatcatatttagtcattttgaccaaatgagggatttggtcaaatgagggattccctcaaagcaatatcaggtaaaccaagttgctttcctcactccctgtcatgagacttcagtgttaatgttcacaatatactttcgaaagaataaaatagttctcctacatgaagaaagaatatgtcaggaaataaggtcactttatgtcaaaattatttgagtactatgggacctggcgcagtggctcatgcttgtaatcccagcactttgggaggccgaggtgggcagatcacttgagatcaggaccagcctggtcaagatggtgaaactccgtctgtactaaaaatacaaaatttagcttggcctggtggcaggcacctgtaatcccagctgcccaagaggctgaggcatgagaatcgcttgaacctggcaggcggaggttgcagtgagccgagatagtgccacagctctccagcctgggcgacagagtgagactccatctcaaacaacaacaacaacaacaacaacaacaacaaaccacaaaattatttgagtactgtgaaggattatttgtctaacagttcattccaatcagaccaggtaggagctttcctgtttcatatgtttcagggttgcacagttggtctctttaatgtcggtgtggagatccaaagtgggttgtggaaagagcgtccataggagaagtgagaatactgtgaaaaagggatgttagcattcattagagtatgaggatgagtcccaagaaggttctttggaaggaggacgaatagaatggagtaatgaaattcttgccatgtgctgaggagatagccagcattaggtgacaatcttccagaagtggtcaggcagaaggtgccctggtgagagctcctttacagggactttatgtggtttagggctcagagctccaaaactctgggctcagctgctcctgtaccttggaggtccattcacatgggaaagtattttggaatgtgtcttttgaagagagcatcagagttcttaagggactgggtaaggcctgaccctgaaatgaccatggatatttttctacctacagtttgagtcaactagaatatgcctggggaccttgaagaatggcccttcagtggccctcaccatttgttcatgcttcagttaattcaggtgttgaaggagcttaggttttagaggcacgtagacttggttcaagtctcgttagtagttgaatagcctcaggcaagtcactgcccacctaagatgatggttcttcaactataaaatggagataatggttacaaatgtctcttcctatagtataatctccataagggcatggcccaagtctgtctttgactctgcctatccctgacatttagtagcatgcccgacatacaatgttagctattggtattattgccatatagataaattatgtataaaaattaaactgggcaatagcctaagaaggggggaatattgtaacacaaatttaaacccactacgcagggatgaggtgctataatatgaggaccttttaacttccatcattttcctgtttcttgaaatagtttatcttgtaatgaaatataaggcacctcccacttttatgtatagaaagaggtcttttaatttttttttaatgtgagaaggaagggaggagtaggaatcttgagattccagatcgaaaatactgtactttggttgatttttaagtgggcttccattccatggatttaatcagtcccaagaagatcaaactcagcagtacttgggtgctgaagaactgttggatttaccctggcacgtgtgccacttgccagcttcttgggcacacagagttcttcaatccaagttatcagattgtatttgaaaatgacagagctggagagttttttgaaatggcagtggcaaataaataaatacttttttttaaatggaaagacttgatctatggtaataaatgattttgttttctgactggaaaaataggcctactaaagatgaatcacacttgagatgtttcttactcactctgcacagaaacaaagaagaaatgttatacagggaagtccgttttcactattagtatgaaccaagaaatggttcaaaaacagtggtaggagcaatgctttcatagtttcagatatggtagttatgaagaaaacaatgtcatttgctgctattattgtaagagtcttataattaatggtactcctataatttttgattgtgagctcacctatttgggttaagcatgccaatttaaagagaccaagtgtatgtacattatgttctacatattcagtgataaaattactaaactactatatgtctgctttaaatttgtactttaatattgtcttttggtattaagaaagatatgctttcagaatagatatgcttcgctttggcaaggaatttggatagaacttgctatttaaaagaggtgtggggtaaatccttgtataaatctccagtttagccttttttgaaaaagctagactttcaaatactaatttcacttcaagcagggtacgtttctggtttgtttgcttgacttcagtcacaatttcttatcagaccaatggctgacctctttgagatgtcaggctaggcttacctatgtgttctgtgtcatgtgaatgctgagaagtttgacagagatccaacttcagccttgaccccatcagtccctcgggttaactaactgagccaccggtcctcatggctattttaatgagggtattgatggttaaatgcatgtctgatcccttatcccagccatttgcactgccagctgggaactataccagacctggatactgatcccaaagtgttaaattcaactacatgctggagattagagatggtgccaataaaggacccagaaccaggatcttgattgctatagacttattaataatccaggtcaaagagagtgacacacactctctcaagacctggggtgagggagtctgtgttatctgcaaggccatttgaggctcagaaagtctctctttcctatagatatatgcatactttctgacatataggaatgtatcaggaatactcaaccatcacaggcatgttcctacctcagggcctttacatgtcctgtttactctgtctagaatgtccttctgtagatgacctggcttgcctcgtcacccttcaggtccttgctcaagtgtcatcttctcccctagttaaactaccccacaccctgtctgctttccttgcttatttttctccatagcattttaccatctcttacattagacatttttcttatttatttgtagtttataagcttcatgaggcaagtaactttgctttgtttcttgctgtatctccagtgcccagagcagtgcctggtatataataaatatttattgactgagtgaatgagttttacatggccttatgaattaacggtgagtctaaatgttataatcatactttgagagggagaaagccagttctattttctactttcctcttaagaagttcaaaaattcattttattaaaaaaacaggaggtaaaatatatacacagccaaatctagtgaaagaaaatctgatgaatataagttcatttacgttttagaaatttttgtgcagtgaggaaaaccagtactgttagaaaagtcatgccaactcagccactgtcaggagtaagttgattttccattgaagtccccaaattccctcttaatggagtattggctatatcttaaacatatctttagtttaagacttctgaaaatgttgtctttgtctaaaatgttaaaatcccatcctactactgacctgctactcttttttctggggtgattttacccccaacaaattctataaatgccttctctggctctgattcaaaaagtgctcacaaatggaaatgctggggacagaaaatttcaacttcttcacctgtcatactcatatcatagctgaacactctaatagcacacacacacacacacacacacacacacacagacccacacacacacacacacacccctatcatcttctgggtaggggaagggaaaggcgcttgaacaacagacacaagagctggtctaataattcatgtagcaccttctgtttccttcgttgaaattttactctgaaggtgactcagagtcaattaaattggtgtgcaatgagttcatctctaaactgattcttttctttggtgaaatgaagcttattaaacttaataaaggtaattaaacttgaaaaagatgagcttatatgtctcttactactccaagaaagactgaactcagctggttactcatggatagttcaataagacaaatcaaatcaattggaaaggaacgagatgggtaaaaaaaaaaaagccattaaatgaatctgctcaataagcactcctttaccatgctaataaaaataatgtaacccagttctgtaaaaaggttctagtactttgaaactcaagttcaaaacaaaataaaatgcaaacttcgcttcacctaacacctcccacaacattctagctacccaactgggtgaatattgtaattgcccacaaccccgaattcactttttccctccagtatgataaaacagattgattcccttttaaagcaataccctttcttctctcccatcttgtcggtatcagagataatggataggtgagaaaaaattaaagaagcttctggattcattgtaatggggacctaaccatcacactatgcagcagcaaatgggatggtctggaaagcagaccagaaccttgtctggtaactttgcttctaatgtctgtctgtgtttcctaaactgaggcctaactcttgactttttgacagtggtgctcataagaaagtttggggctgggcacggtcactcatgcctgtaatgtcagcactttgggaggctaatgcaggaggatcacttgagtctaggagttcaagaccagcttgaacaacatagggagaccctgtctgtattaaaaaaaaaaattagccagacgtgatggtgcaggcctgtagtcccagctacttaggaggctgaggctgcagtgaactgggatcataccccttcaagaacacatgtgaatggtggggcctctcagctttctctgatttggcaacccagaagaaatatgtgctttctctttgaagattcacaggatcctagcacttggaaacctaggccactgtccagagcagaaggtcacacaatttctcagagtgacttttgttcatttcagggtgttgacaccgggcccaacacttgaaaattgcttgagatgataaattgcttgaggtgatcaaagaatatatcagctcttcaaagctgacctcattcttggtgcaactctcagggccagaatgtgtgcttcccgaagctcattttcctatctgatttgcctgttgaaactctgtgaaagacccttgaatgctaggaatttgaagggacaaaaagttgaagaaaggtgaatggatttcagggtggaagtggactggattttactctcacttcatcaggcagagctatctcagtgataaattgaaactctcctctggctccaaagaacaaatcatgagctgggtggaaatgtcagttgagaagaagagcagcaaacagctttgttttcctatagttgtggttttacatggtgatgatgacacacgaagatgaaaatgtgcagcatgaactccagttgttatctgagtgagcatctctgccaacactgaaggatatgtgtgggtgtcacctgaaaacaaagagaaagacagagagagaaaaagaagaaaaggaggccctgtttcggaaagaagagccagttaatcaaagatcagcagtgacaagtggcgctgtttatttcatgagctttatatgtgatttccttccccttgctaatctcgtctgaatttattctctggactaaatatatttgcatctggtgactgaggaaggggtggaaaaggtgaccttgaatgggcatcggggtagttaccatagttatttagtcatttcttcagtctcttgggcacacacttagcttcccaaatggaggtttctgctaacttttgagaacctgtgacatattacacagggaagacaaacttcaggtggttgttggggaccctcttttatccccaaccctatgcaatgcttgtttcatttgctttatgtttctccttcctctcttctacttcattcattctagaactagttaatgggcacctgcccagcactaagatgtgggctaggtacagggatgtggcagtgtgcagcacagatattacctccacacttccgaagtgtagagtgtctgctttgtatattacttcagttttttttttcttttcctgccccctatatcctgcttctaggggtaaccacttagtcttgattttgggacttagatcttaatgtggctacttgatagcctttgttggtttgcctgaaattcatttctttgacatgttcctatttaacatctctaactctttcaatgtcatagatcaggaatcagcaaatttttttctgttaagggccagatagtaaatattttaggctttgtgactatactgtctcttatagataataagttttgccactgtagtgtgaaagcagccataaacaatatataaacaaataagcatggctgcattccaataaacctttatttatggatattgatatgtgaagttcgtgtgattttcatgtcatgcaatattacttttcctttgtttttttcccccaaccatttatagatggaaaatccatttttagttcatgggctgtacaaaggcaggtagtgggctggacatggcttatgggctacggtttgctgatccttgacttagatctaagctgcaaccttagctataggcttatttttgagttccagccaccttctacatttttagggccagaaggaattggtttgaatgtgtgtaaaggcttcttgggagtgctgagagtcaagcatctcttttgaaagaaggacatggatcaataaagaagaaggaagagctttcatctaaggaaagccatttgaggtagaagaaatgggaagttataagcaaagggaatgagaagctgtttcaggaagacagagtcttctgtatattattattattaattttgacagagtcttgctctgtcacccaggctggagtacagtagcatgatctcagctcactacatcctctgcctctcggggtcaagcgattctcatgcctcagtctcctcagtagctgggatgataggcacacgccaccactcccggctaatttttttattttttatttttatttttagtagagatggggtttcaccatgttggcgaggctggtctcgaacgcctggcctcaagtgatccacccaccacggcctcccaaagtgttgggattacaggcatgagccactgtgcctggcctatattattgatgaaagcctaaacatcttgggagctcttgttactcttttctcaagtcctttctactcttttccctcttttctaggcatcacatccttgtaatctccaaggaaacaaatttctttctttcttttttttttttttgagatggagtctcgatctatcgcccaggctggagtgcagtggcactatctccgctcactgcaagctctgcctcctggttcatgccattctcctgcctcagcctcccgagtagatgggactacaggcatccgccacccaccaccacgcctggctaattttttgtatttttagtagagacagggtttcaccatgttagccaggatggtctcgatctcctgacctcgtgatccgcccaccttggcctcccaaagtgctgggattataggcatgagccaccgcgcccggccaggaaacaaatgcacagaaggaagggggcagaaaatggtctgtgtccaatgtgatgaacaggcttgacttccctgctaattcttccctatgtagtacatccaaatccaactctgggtgggtagagatcagaagcagctgtctcagaattggcctcctactttctacctatctcatgtttccagtctgcatttggctgccatttatgagtggccaagagtaacccctcatgaatctacattaaggctcagcatttcacaagtagctgatgaaatcagtattactcagatcagaaaggcaccgacctaacccttaccatcccttgcccccattcctcactccagtcttgttatacccaaggtacaaatcgttcctggaagcagcccagcatatgggggcaccctaagccacacacccagtcacaccatctgggcaatttaaaaatagggccaaatggagcatttagactggtctgtccagccaagatcaggaaattgcctctaaaaggtcagatgattaagattattgtaccaacagtctaggatgtcagtaatgaaaaaaagcttctggcagaatgaattttcctgactttacacatggtgttccagttctgagttggggtgaacagctttgggaaatcccaagatttttctactccagaaaatagtgctactatgtacatttatgcactgtgtgccttgcacaaaggcccctagtgaagggaatgaagagggctgaaatctagtcaagctccccttatcaagctctgcacctgcttaatgaaggagagggcgccttctctaatgcccgcatgtatgggctattgaggccctgatagaatgctagcctttctgccatttggttactgagctttatagaaattatatccccattctcaaagcaggaattttctaggatgagtaatagttaaaacaaaataaaactacccctcccccacaaaatggaatggttctaaatatcacaaaaatttatctcctcggtcccttctttagtcttcccttcaccttagctctgcatgttttaatttagttggttggtttttcttgacttacactgggtgggtatgtctttggagagtaatgagagaagaaacttcctagttcgtgtcctagtttggctcttagaagaaaaacaaaaaatgtttttgtgacctgaggaatactaggtaatatagcttggatatttgtcctctccaaatctcattttgaaatttgatccccagtgttggagatggggtctagtgggaggtgtttgggtcttaggggcggatccctcatgaatggcttggtgccattcgtatgggattgagttcttgctcttagttttggggagatctggttgtcaaaaagagtctggcatcctattcagtgcctcccttctcccctgcctatttctctctctttctcactctttctctctctctatctctcacttcctgccatgtgatctttacataccagctccccttcccccttctgccatgactggaagcttcctgaagtccctgctagaagcagaatagagtgctatacttcttgtacagcctgcagaactatgttccaaataaacctctttttgttataaattacccagcctcaggtattcctttatagcaatgcaaatggactaagacactgggtttggggttagttttggggatgtacctagaactcttcagttaatgtagtctactcttatttcttagttatcagtacatgaggggaccagactaaataacctcagagctcattcctataattgttttcatactccatattataactctcctagaattatcttcccatcatgaataccattgttttgggtttctccactatcacatttctaagtcttacagatataaatattttatgtttgagatttgtcaaccaggattatttgaataaatgtataattctctacaacagttaagtttactaatttatcaaaattgtttccatcactttttctggagaaaataatgaattctaaagtttagtttaaagttaaaataatgaattttaaagtttaatgaagtttaaggtttaaaaaatgatgtaatagtttactatgtaaatactatgtaaactattacatcattttttaaagcttgtcattttccaaataaacttcttatacattattgaagtcttcatagtgaactacatcttgcatgtgatgggtgctcagaatatcttaatgagtgaatcaatggatggatggataaatgaatgactatctttcatttgataaatatccgcaagctattttggtttttgacaaattagacgaaacaggtattatgaaaagacttgggaaaattgaggacaaattagttaactagatactatgaaaagacttgggaaattcatatttttaaaattattgaaatgtattaattaatatgcattttaagacattgtttaggcattcagaagcaaaaactgtttatccttccttggcaacaaacagaactctaattgtgttcagttatctactctccatgtgctctggggagttccagggagtggataaggattagtttaagccagaatggtagtcctaaccttctcatcagtgattggtttaggcatggacacatgataaaattctgaccaatagcctgacgggtctctgataaagtttctttttgctcttttttttattttgagacagtctcactctgttgcccaggctggagtgcagtggtgccatcttggctaactgcaacctcactgcaacctccagcttcctgggttcaagcaattcttgtgcctcagtctcctgagtagctgggactacaggcatgtaccaccatgcctggctaatttttgtatttttagtagagacaggatttcaccatgttcgccaggctggtcccgaactcctgacctcaagtgatctacttgcctcggcctccaaagtgctgggattacaggtgtgagccaccgtgctcagcctctccttgctctttaaaaagagatgtttggaaacaaagtttcctttctgctatagaatgttatgtctgcaagcagcatctgatatagcctctttgcgaccaggggaggaattggcctgagaacatgctgaggcaggaagagcagaaagaggggaggaacctggatcttggtgacattattgagctgcagattgagccgacttgaattctccttgcttccttccttccttccttccttccttcctcccttccttccttccagttcttgtcatgtgagacagtaaataactttattgtttaagcccttttgggttagattttctattacatgaagtttaaagcattctgataacttcatgtttattgatgtgtataaatactaatatattctattatttgggggatacaaagaatttgactcaatagtatcttgttctattgacatgttcaattattaatcactgataaccctgaataactaaatgttattaccacatttaggacaatatccacgtccactgacatatgaaatttgggcaatttgcttctttgggaagcattataaatcacagaacagcagaggatacaaagacccccacaagagatcatcaagattttcttcttcccttctttttgtcatacacattgctgagaaggagcacctccaggaaggaaccaaattatttgtatttttctgttatttttagttttgagacccggtctcactctgtcacccaggccggagtgcagtggtacagtggctcactgcaacctctgcctcccaggttcaagcaattctcctgcatcagcctcccaagtagctgggattacaggtgcccaccagcacgcccagctaatttttgtatgttttcagtagagatggggtttcatcatgtggccgggctggtctcgaactcctgacctcaagtgatctgcccgcctcagccttccaaagtgctgagtttacaggcatgagccaccaagtccagccaatatttgtattttgaattaaagtatgtatgtgaaaaatgagaacactggctcacttcctggtaatataaaatacaacatatcagtaaaatcttccatgattctcctagttcagtgatctctttctacccctgtgttacctaatgctggcctaaactccagcggcctgtagaggagattggtttttgtagttgtaaaataatattttaggctgggtgtggtgcctcatgcctgtaatcccagtactttgggaggctgaggcgggcagatcacgaggtcaggagatggaggccaacatggtgaaaccctgtctctactaaaaatacaaaaattagctgggcgtgatggtgcgtgcctgtaatcccagctacttgggaggctgaggcaggagaatcgcttgaacctgggaggcggaggttgcagtgagccgagatggcgccactgcactccagcctgggcaacagagcgagactctgtctcaaaaaaaaaaaaagtcacgtttaaaaattcaaagtatacttatatttaaaattttctaataatgaaatgttatcataagaccaaagtagatgtactgggcctggatcttcatcctttcagtctgtctttgattctgacagtggcacctccagcaacattgatcttctctgggggccctgggataacacattagcttctagaatggcttggggatttcctgcttgtgtcctatgaaaaggacacaaactggccacacatgtgttcagtctagtgatggggactgagaaggacagaaagagatttgacagagttttgaccttagcaatttactacttggttggggaaataactcgtcataaaggtagtatatactaagctctaattaaatgatatacaattcaagttcagaggtgaaagactattgtggactggaattccaatctggccctgaaaagcaatacacagcttttcaaacttgtgggaaatagaatagctttgagaaggagtacttgcatttttaatttttagaaatattgccaatttgctttgcacagaggttatattgatatacagtcccatcagtcacgtatgagagagccttttaccctatttattctcattagcacagtgttaacatgtttgatctttgccagtttgatagtttgaaatgatattttatcattgagttgatttgtgtttcatttttatgaatcagattcatcatcttttcatttctcataagagtcttttttttttctgtgaactgtctactcatatcctctgcccatttttttttcagttgtattgtcagctttttaatgtagaatcacttcaaagaaactattcctttgcttgtaactccttcattttagagatgaatagatgtaagaggtaagcttattgtttctttgtttattcatcagcttttattaagtatccattccatgccaggcactgcacttgtcacaggaattagatatagatcctgtcctcaagaagctcccaggctatgggagacacaaagcttttcacatggttttcaggtctataatagagctatacatagggagttattgtggctcaaaggtggggcatcacctaaccatgcaaggagttggggaggctcaggaaagtatttgtagatgacagcagctgaatcttaaagaacaagggaggcttaggcaagtgacgaagcggggaattacatttcaggtagagagactaacttgtgcaaaaacacaagcacggtgcctttgaggagttcaatgtgtgaattcagggtggctggagaataggttaagtccaagagagtataagagatgagaccacctctattaagacaaactctttattcctaggaatttggggcttatcccaagggcaagggaaagctaataaaatatataattttaaaaatttgcttaaaattattatttataatatataacctataatcttacattgcagaaagctataaaatgaaaactaaatgtcttcctcctccttgtcccctgtcccacagttctatttttcagaggttaccattttttttttaacagtttccatttacctccataactctcaatatgtttatctccctgtttcttgatttgtcaaaccgaacagtatttacagactctccactatgaagatgaagaattcagctcacttctactaactcccacccttccaattttttggaaggttttaagcacaagagggacctgattaaatttgcattttggaaagattattttgctagcaatgtgaggagtggttcaacagctgttgcagtaaatcaaagaacataagttggagggatgcattagtggaaggtacctagaggacagaaaggtgaggactattggaagactagaagatagagggaaggagaaggtcactccttggttttatttatttatttatttttggagatggagtcttgctctgtcgcccaggctggagtgcagtggcacgatctcagctcactgcaacctccgcctcctgggttaaagcaattctcctgcctcagcctcccaagtagctgggactacaggtgcccgccaccagatctggctaattttttttgtatttttagtagagacggggtttcaccatgttagccaggatggtcttgatctcctgacctcatgatccacctgcctcagccttccaaagtggtgggataacaggcgtgagccaccgtacccggccactccctggttttagactggtgcaggtggtacttacactctgtgagctagagatgcaggaggaggaattaattttagtagggggcatgatgttgaatttcactttggacatgttgaatttggcgtgtttgtgagaatccaggtggagatgccttatgatgcagctggacaactaatagagttgcggcggtcaggagtgagcagaggctagggagatagatctatgagccagccctcaatgtatagtttattcattttctcattcatttaataaatatttattgaataccatctaagagctaaatgctgggtataaaatgatgagagaagagacaaatttcctcacctcatggagcttttaagctggcagaggagacaaacattaacacagaaactcacaaatacatatgcaattatggactgtggtaggtgctacaaaaaagaatacaggcttatgtgatagaataacagcatgcaccaaatttagactggggcctgggagggaaacagatgggcaggcaaagcttctttatacctagatctgccaggtgcagaagagttaaagaagccatgtgcagaggacattttgaagtggaagtcatggtcaggaccagccataatctttgtggagcttaggataaagtccaatcaacggagacccactaaatatctagacatcatcaatcaagagagctaagtgatattacatatgttctatccccctctcttgacaaatatatctttatgatgacaaatagaaaaatacacgtaaagtaaaactgaaagttggcaaaatatcaatgacaaccaaatttagttattatcgcacacgtccgggtcttctgttatgggttgagatgattgtatgagcaataaaattaagacagatacaatattcagtttcttgaactgggtgctaattactattcactctgcaaattttctgagctatatatgtatgacttgtgtacttttctgtatttactattccatagcagaaaatttaaaggatttatcaaatacttacgtcataacattatttatttatttatttatttatttatttaattaatttattttttttgagacagcgtctcgctctgttgcccagactggagtgcagtggcacaatcccagctcactgcaagctctgcctcccaggttcacgccattctcctacctcagcctcccgagtagctgggactacaggcgcacgccaccgcacccagctaattttttgtatttttagtagagacgggttttcaccatattagccaggatgatctcgatctcctgacctcgtgatctgcccacttcggcctcccaaagtgctgggattacaggcatgagccaccacgcctggcctatttttcagtttttttgagacagagtttcattcttgttgaccatgctggagtgcagtggcatgatctcgggtcactgcaacctctgcctctcaggttctagcaattatcctgcctcagcctcccaagtagctaggattataggcacctgccaccatgcccgtctagttttgtactttttagtaaagacagggttttgctgtgttggccaagatggtcttgaactcctgacctcaggggatccactcgcccacctcgccttagtcagtttggactgccataacaaattaccatatgctagttgcttaaacaacagagatttatttctcatagttctggaggctgggaagtccaagatccagtgtctggtgaaggcctgtttcctgttttgcagatggtcatcttcttgtggtacctttatagggtatgaaatagagagaggaagcaagctcttttgagtctcttcttagaagagcactaattgcatcatgagagcctcacccaaatgacctaccgacttcctaaagtcctcacctcctaatagcactccactgggggttaaggtttcaacatatgaattctgtgggacacaaacatgtggtctgtaacagtcatgttttcaaaagcagttgtaaggacaaatttgatgtgtttcatcaagatttctatctgttggcagattcataaaatattgtgtgtaatctttgaatttttctaaagaacattgtcattatcagcacatttgaagtcatgtctcctagtgccaaatataaatgatgagtcatatgtgacttctgtatttttggccaaaattctgacttatgtgcatttttatgtacattctttccaaccgtggtagtgccattctcataggctttcctttgataattaaaaaacaaaacaaaacaaaacaaaaaacattaaaaggccaggcgtggtggctcatgcctgtaatcccagcactttgggaggccgaggcgggtggctcacctgaggtcaggagttcaagaccagcctggccaacatggtgaaaccccgtctctactaaaaatacaaaaattagccgggcttgttggcgggcgcctgtattcccagctacttgggagagtgatcgaatagaaaaaagaggatcatttctctcagcttcagcctgaaaagtctcagggaactgttctgacttgttcaccttagatcaaatgccaatggggaggactcttttatggaagaaggggagaagcgtacagacatgatttctggaaaaataactgtctgctgagctgctgccccatttttgtctaagataggtctaagacaggtgtagttcttcataagaaaataagaaaatggaggttttggagtgtcatactgtttcattcactggcaaggtttcatgaatccggctccatgtttttttccttatgggtatattctgggcttgttcctattatatatctgaatcaccactaaattcaattggtcataaccttttgatggaacatggacccttttgggaatattttaaaagttatggaacttcttccagggaaaaaagcatataaacataatttttttctattgtttcatggtatttatttacttatttattcttttgagatggagttttggtcttgttgcccaggctgaagtgcaacggtgcgaccttggctcactgaaacctctgcctccctggttcaagcaattctcctgcctcagcctcctgagtagctgggattacgggcacccgccaccatgcctggctaatttttgtattttcagtagagacagggcttcgccatgttagccaggctggtcttgaactcctgacctcaggtgatccaccgacctcggcttcccaaagtgctgggattacaggcgtgagccactgcacctggcctgtttcatggtatttattaaaattcttaaacttgtgaagtattcctgaacaagctcatgcaaaggtcactttttttttttttttgagatggaatttcactcactctgtcacccaggctggagtgcagtggtgcgatctcagctcactgcaacctccaactgtgggttcaagctattctcctgcctcagcctcctgagtggctgggattacaggcgtgagccaccatacccagggaaggtcatattttaagaaggaaattgtgtgtcattatgatgttgtgaatttggacatcttaaaagatatcaagagatctacctttggttgctctaggaatgtgtatttttaaaaataattttatttatttatttttatgggtacataggtgtatgcatttatggagtacatgagatattttaatataggcatgcaatgtgtaataatcacatcagggtaaattgggtatctatcaccttaagcatttatcctttctctgtgttataaacatttcaattatactctttcagttactataaaatgtacaataagttattgttgactgtactcatcttgtgctattgaatacttgatcttattcattctaactatatttttatttccatcaaccatctccaattcatccccctaccccatacccttcccagcatcattctattctctacctccatgagttcaactgttttaatttttagcttctacaaatcagtgaaaaggtgtgaagtttgtctttctgtgcctggcttatttcacttaacatgatgtcatcccgttccatccatgttgtcgcaaatgactggatcttattcttttgtatggttgaatagtactccactgtgtatatgtatcacattttctttatgtattcatctgttgatggacacttaggttgcttccaaatcttggctattgtgaacagtgctataataaacatgggagtgcagagatctctttgatatattgatttcctttcttttaggtatataattaacagtgggattgctgaatcatatggtaattcaatttttagttttttgaggaacctccaaactgttctacacaatggttgtactaatttatattcccaccaacagcatatgagagttcccttttctccatattttcaccagcatttgttattgcctgtcttttggataaaagcattttaactagggtgagatgatatcttactgtattttgatttgcttttctctgatgataagttatgttgaccaccctttcctatacctgtttgccatttgtaggtcttcttctttttttttttttttttttttttgagatggagtcttgctctgtcacccaggctgaagtgcagtggtatgatctcagctcactgcaacctccgcctcccggattcaagtgattctcctgcctcagcctcctgagtaggtgggattacaggtgcgtgccaccacaccaggctaatttttgtatttttagtagagacggggtttcactgtgttggtcaggctggtcttgaactcttgccctcgtgatccacccaccttggcctcccaaagtgtaggtcttcttttgagaaatgtctattcagatctttgtccatgtttaaattggattattgtattttttcctattgagttttttgagctccttatatagtcttgttattaatctcttgtctgatggatagtatgcacatattttctcccattctgtggggtgtcgctttgctttgttgattgttctctttgctgtgcagagctttttatcttgatgtgatcccatttgttcatttttgctttggttgtctgtacttttggggtgtcattcaataaatctttgcccagaccaacgtcctggagattttccccagtgttttcttttagtagtttcatagtttgagtcttagatttaagtctttaatccattttgatgtgatttttgtatatggtgagagacaggagtctagttacgttcttctgtatatggtatcctgttttcccagcaccatttattgaaaagactgtcttttcccccatgtatattcttggcatctttgttgaaaatgagttcactgtagatatatggatctatttctgggttccctattctgttccattggtctatgtgtctgtttttatgctagtaccatgctatttggatactatgactctgtagtataatttgaagtcaagtaatgtgattcctccaggtttgttctttttgctcaggatggctttggctattctgggtcttctgtggtcccaaatagattttagaattttttttctatttctgtgaagaacgcaattggtatttcaatagggtttgcatttagtctgtagattgcttgggtagtatggacattttaacaagattggttcttccaattcatcaacatggaatatctgttcattttttcctgtcctcttcaatttcttgcatcaatgttttatagttttaattgtagagatttttcactgtaagttaagtttattcctaggtatcttattttatgaatatttgtagctattataaatggatttttaaaaaatgtcttttacagattgcttgctcttggtatatagaaatgctgagttttgtatgttgattttgtatcctgcaactttactgaattttgtttattaattcaaatagtttttttggtagagtctttaggtttttctaaatataaaatcatatcatctgcaaacaagaataactggactttttccctctttaatttggatcccctttctttcttttttttttgtctgtttgctctagctagaagttccagtattgcgctgaataacagtggtgaaagtgggcatccttgtcgtgttccaggtcttagaggaaaagctttcagtttttccccattcagtatgctagttgtatgccatgtatggcttttattgtgttgagatacattcctactatccttagttttttatttaaagggatgttgaattttatcaaatgcttttttcagcatcaagtgaaattatctggtttttgttcttcattctgttgatacaatgtatcacattgattgatttgcatatgctgaaccatccttgcattcctgggagaaatcacacttggtcgtgatgaatgatttctttaatgtgttgttgaatttggtttgctagtattttgttgaggatttttacattaaggtttatcagggatattggcctgtagttttcttttcttgatgtatctttgtctggttttggtatcatggtaatactggcctcatagaatgggtatggaagtgtttcctcttcttctattttttggaatagtttaagtaggattcgtattagttcttgtttaaatgtttgataaaattcagcaatgaagccattcggtcctgggcttttctttgctgggagattttttattatgacttcaatctcattacttcttattggtctattcaggttccggatttcttcatggttcaatcttggtaggttgtatgtatctaggaatttattcatttattctagttttcccaatttattggcctatagttgctcatagtagtctctaatgatcctttgaatttctgcagtatcagttgtaatgtctcctttttcatctctgattatatttatttgggtcttctctcttttcttcttagtatcactaaagatttgtcaattttgtttatcttttcaaaaaaccaactattcatttcagttatcttttgtattttatttttgttttaattacatttgtgtctgctctgatctttattatttctttttttcagctaattttgggtttggtgtgctcttacttttctagttctttaacatgtattattaggttgtttatttgaagtgtttccttttcttttcttttctttttttttagacagagtcttgctctgtcgcccaggctggagtgcagtggctgatctcggctcactgcaagctctgcctcctgggttcatgccattctcctgcctcagcctctcgagtagctaggactacagccaccacgcccagctaattttttttgttttttgtatttttagtagagacagggtttcactgtgttagccaggatggtctcgatctcctgaccttgtgatctgcccaccttggcctcccaaagtgccaggattacaggcatgagccaccgtgcatggccacaatgttgtaatattctgtgtacttactattaccagtgagttttgtaccttcagatgattttttattgcacattaatgttcttttctttcagattaaaaactccctttagcatttcttataggacagttctgatgttgatgaagtccctcagcttttgtttgtctggaaaagtctttatttctccaccatgtttgaaggatatttccaccagatatactattctaggataaaagtttttttctttcagcattttaaatatgtcatgccactctatcctggcctgtatgttttacactgaagagtctgctgccagacatattgaagctccattatatgcaatttatttcttgctgcttttgggatactttctttatccttgacctttgggagtttgattattaaatgtcttgaaatagtctcatttgggttaaatctgcttggtgttctataatcctcttgtacttgaatattgatatatttctctaggtttggaaagttctcttttttttttatccctttgaataaattttctactccaatctctatctctatctcttctttaaggccaataactcttagatttgcccttccaaagctgttttctagatcttgtaggtgtgcttcattctgttttctcctctcactgtgtattttcaagtagcctatcttcaagctcatgaattctttcttctgcttgatcaattctgctgttgaaagactgatgcattccttaatatgtcaactgtatttttcagctccagaatttctactggatttttttttttttttgagacggagtcttgctctgtggccccaggctggagtgcagtggcgcaatctcggctcactgcaagcttcgcctcccgggttcatgccattctcctgtctcagcctcctcagtagctgggattacatgtgcctgccaccacgcccagctaatttttttgtattttttagtagagacggggtttcaccatgttagccaggatggtctcgatctcctgacctcgtgatccacccgccttgacctcccaaagtgctgggattacaggcgtgagccaccacgcctggcctggatttttaaaaattatttcaatctccttgttaaatttatctgataggattttgaattccttctttatgttttcatgaatttcactgagcttccccaaaacacatattttgaattatctatctgaaaggtcacatatttctgtcactccgggattggtccactggtgcctgatttagttgatttggagtggtcatgttttcttggatggtcttgatgcttgtggaaatttatcattgtttgggcattgaggagttcggtatttattgtagttttcacagtctgggcttgtttgtacctgtcctttttgggaaggctttccaagtattcaaagaaaattgagtgttgtgatttaaatctttgatcactataaccatacctgcattagcaggcaccataagcccagtaatgccgtgactcttgcagattcatacaggtaccatcttggtggccttagataagatccaggagaatccctagattaccaggcagagattcttgttctcttcccttactttcccctaaacaaatgaagtcccattgtccatgctgagcttcctggaattgggggaggggtggcacaagcaccgttgtggccatcagcactgggctacactgagtcagactcaaagtgtagcacagcacactgagtcttacgcaaggcctgcagtgactactgcctggctactgcaaatgttcactcaaggccaagggctcttcagtcagcaggtggtgaatccatccaggcttgtgtctttttcttcagggaggtgagcttcccctggcccagggcaggtccagaaatgccatcgggcagccagggcctggagtcaggaacctgaggaatgtacttggtgctctatcctcctgcagctgagctgacacccaagccacaagataaagtctttcccactcttccttttcctttccttatgcagaaggagtttctctccctgtccaccactgccctaggcccatgacaaatactgtcaggctatggctgaagttcacacaaagcccaagggcttttcagtcagcttgtggtgagtgctgccatgcttgggtctctcctttcagggcagtgggctcccctctagcctggggcaggtctagaaatgccttccaggaaccaaggcctggaatctgggaccccaagagcctgctcagtgctctaccctactgtagctgagctggtccccaagctgcaaaacaaagtcccctttaattttccctctcctttcctcgagcagaaggagtctctccctgaggccaccacagcttggaatgcactgagtcacagcagaagccagcatggctctgagtctcacccaaggcctgtggcaagtactgcctggctaccactgatatttattcaaggccaaagggctctttagtcagcaggtgattaatcctgccaggactgggtcctttccttcaaggcagcaggttcccttctggacctaaatgtgtctagaaatgtttttcaggagctagtgcctggaatgggggcctcaggactctgcctggtgccctaacctactgtgggtgagttggtatccaagttgcaagaaaaggtcctcttcacgctccccactcctctcctcaaacagaaggaaggagcctctcctggagctgcgagctgtgctgccttgggctggggaggggtgatgcaaacactctcttggctgctctggctggtgtctcactatgtcgcatgccccccaagtccactggtttcaagccacatggcatcagtagttgcttaggaattacagtccttgtggcctagactacctttcaagtttatttaggaccccagagtactttagcctgaagtggtggggcttgctggaactcaggttctgaccactgggatgggcaattctcctctggctagggttggtctagatgctccctctgtgggttctggctgaattctgccctgtgttgctttctgctgtggcaggacagtactgagttccaacgtaaagtcctgcaatcactgcactctttctcctccaagcacacacattttctctctgctgctgccaggctatgggggaggggtgatgtcagtgattcaagacagtctttattaccttcttcagtgtccctttccttgatatgatgttaaaaccatgcactgtgaaggaatgtgtatttttgaatccattctcatgttgaatcaatccacagaaagatacacaaatctaacgtcatttctgttcaaacaaacaaaaaaattcagttagttgttgtgcatctgtgatgtcaaacatcaacgagacacttggatataatgtttgtgaatttgttttcagtcttgaaagccttctgtgtagaagagagataagtgagtttcattttatgaggcccagaggtatagaataaagaccaatgacttgatttctcaggagaaccaaattaaaacagttgaagctcctctctgtttcattccaaaatggcaagagatgtatgttgaaagcaagaataaagggctttggttgggctcaagaggcgtcatctgtttaaaatatggcaatagtgcgtattgtcctcaaattccttaccccaggtcaaagtgttagggaaagaggcctggtctactaatgggtacatggttcccaaaggtattcccctatctaacatcagggccttggttaacaacacatttcttctaaaagggacagaaacaacttcttaactccacttccaaacttcctaagagagcagtgtggggaaatgatgattccttgctttaatttatactgcctatttcccttccacctacacaggaaaggcaggagagtgcagtagaactggcacttccttcttacatagtaggatgaagtaattgaagtaagatgaagtaggatgaagagttgactatatgccttggacatctcttacgtatcactgcaaatctcaaccttgcctgtctctttttgctccttctattgaggcaagcagcttcatgcagtttcaacctgacagtacctcatctcagacgccctctgaatgctgctcacctgctctggagcttctgagctgatacctttgtgtagattccttagaaacacagttggtgcccacatatgcttggcagattagattatgactttcaatcttcattccctccctgtaatagaattatacattgaaactcattgtcaagtgtttttatttttagtacctcccagtggaagagatggagattttatctctgcctccttgactttgggtttggctatatgactttggccaatggaatatggagtgcatgggatgcaggcagaagctgtaaatgtctgtgttgtttgacttggtctcatgtttctgccattcaccatgagaaagcatggaccaggaagtttctggtccaaagagaagatacatatggagtagaattgaacccaacccactcacagactggaatggagcatggccagctgacctacagacccaggagtgaaaaattgacatttgttttgtaagcttataaaatttggggttatttgttatgtagtattgttgcattaataggtggtgatacggtttggatctgtgtccctgcccaaatctcatgtcaaattgtaatccccagtgttggaggagaggctttgtggaaggtgattgggtcacgggggcggatttctcccttgctgttcttgtgatagtgagttttcacaagatctggctgtgtaaaagtgtgtagcacctcccccttcattcttttccttctactctggccacctaagatgtgcctgcttcatcttcaccttttgccattattgaaagtttcctgaggcctccccagccatgttacctgtatatcttgcatgagtcaatgaaacctcttttctttataaattacccagtctcaggtatttctgtatagcagtgtgagaatagactaatacagttgggtaacatatatgtgcaacctagaaatgtggggtgtcaatgtcctgtggggtaaactctgaaccaatgagaattgggagacaatggttaaatgcttccccctctctactcccagatttcataggttcccatatagtcctgtagggttgaacaaccagtcacatatagtggtgactaattgaataactcacccttgacttggctttcccttcgtccaggttttgtgtcaccttgctacgagtactgcctcctggattcactccccaataaagtattcatatagacatctttgtttcccactttgctttctgaggaacccaagctaagacactgtatgtttacttctaattttcattaattacaagtttatatacattgttcggatattggaggttccaaagtgttcaccaccccaacctcccacacttttgccagcaattagacagtcacattctttagatcttccttgaacaagcctagggggcttcagggaatgtgtaggagggctaatgagaagatgttgacctgatttgagactaaattttattttaccttcctatctatctgaatccaaagcctcctctgtcagtcatcaacagagcccttgctatcgcctaccccgaatctctttcttcttagacaaatagcaatcccagcaataaggatgtactctgtaactcttggataattttccaaagatggaatggactaactagggaagcaaggagttcctcatcactgaagaggagttaaggaagctgggtgatcatttgtgaactatgtacgaattaagtaagtaaataaaaatcatagctatcatttatttagtgctaggcacaatgttaaatatcttaagtatactagctcaagtcctcacaataaccctccacactattttcttcattttttcagctgagggaattgagactctgggaggttaagtaacttgtttaaggtctgtgactaggaaatgacaaggccaacccagtttgtcctgcttccaagcctattctcttcttgcaagtacacatgacattttaactatgggctaggggattaaatcaacttgaccttaagatctcttctatttcagagactctacaagtctactaacttctgcaacaaagcacagtagcaaaaggagatgatataatactgtatgaggtttccttcccacctgtttttcttcatttaaaattgaaaagattaacacatcataacttttcaaacaaacaagtgagtgtagtggttttcacactcaaatcaaacccaaggttgttttctgattccagacaggtttttgcagaatgtagtcatttataaattaggtgaggcttgtgcttgactattctggatggagtggagaaaatgagccatgaaggtctgtgggagtgtggaggtcgtgctgggggaggtataggtgatgtttacaaggacaactaccacagtcagagatatcctacacctgggtgacctctgggtgtttgggaaggattataagtactaaatataatataaaaggaaaaaaggggggcaagggagttgggtttggcgtaagagcttatgatctgactcagagagacctgaaaacattcgagagaaggggaggaaggtgtgtgctttgggaggatatgagtgcacgcacataggacagtacatctgtcactttgagagtgtactggaacatttgcataccctaaataaggacgtgagtgttacttgggcttttctaaggcctaaaatgtgctaagtgaaaacaccgaccttgtgctttttttttctttttattttgacctctgaaatttttattggcctcctgttccccaaagggcaccctgcttctgttggcttaatgtctcagaactttggtgtcattggtctcagacaccactttgccatccactgttggcaggtgggagtcttttgggtggtttgcgtggagttgctgctgtccagagcatcaccaaaattgaagtcctcgccatcttccagcaggcggcggtaggtggcgatctcagcctccagcttgaccttgatgtttggcagggcctggtactcctgggcctggccctgtccctctgcccaggtctgtgccagctctgactccaggtgcagcaggatcccattgagttgttccatctgcagggtgtagcaggcctccacccccccttcaggctgttctccaagctggcctccagatttttcatccagtccaggtcgatctccaaggcctggactgtatgtctcagctccgtgagcatcatcacagcagctccaacctcagcggactgggtggtgaccactgtggtgctctcctcaatctgctgagaccagtacttatctagcccctctcagttcttctgagtcagcttgttgtattgggcctggatgtctgccatgatcttggcgaggtcctgagatttgggggcatctacctccatggtcaacagagctggcaatctgggcttgtaggccttttacttcctcttcgtggttcttcttcaggaagagcagctcctccttgagagcctcgatctctgtctctagctgcagctgagtgacactggtgtcatcaatgaccttgtggagcccatggatgtcgttctccacagactggcacgtggccggctctgtctcatacttgactctaaagtcatcagcagcaagatgggcattgtcgatctgcagaatgatgcaggtattgtccacagtacttgtgaagatctgagtcaggtcctcctcgatggtcttgaagtagtggccccagtctctgacctggggtcccttcttctccaggtgctcccagattttgctctccagcttctcccagattttgctctccagcttccagtttcccatctccaggctcctcactctgtccaggtaggaggccaggcggtcattcaggctttgcatggtctccttctcgttctggatgcctcccattcctgccagacccccggccatacctgcggccatgctcctggaccccaagccaccctggaagctggtggagcgggacatggagatccgggaacctgagctcccagggcctgcatagacgctggccacacttctgaccagtgggcgcggtagctgggcgcctggacagaaccaagttggtggggaaacaagtggtgaagcgcatactgtgccggcagggggtagagtgacaggacagatcaggcttggctgaaggctctgttgttggttgttttgagatggagtttcactcctacggttcagtttccttatctgtgaaattagaacaatattgtctacctcagagtgctatcataaagaccaacagtgaaagcagagttcgcttaatggttctggcatgtgaaattaaaaattccacaataatgttctcaaggacaaaaggtttaatctctagtgtgtgtgtgtgtgtgtgtgtgtgtgtgtgtgtgtttgtatagccacatcaagcatgatatcgttagactactagactttgatgagtcaagaaacataatttttaggtcaagctattggattcaagtagatattttcatagtgtgagtcttaaacaaaaacaaccataaaaaggaaaaggcttatgaataatggagaggagaaattcaggtcacactatgcccagaagccatactttttttctatctcaagtaaggagatctctaaacatatattcttcatagatacagaaaacatctttctttctttttcttttttcttttttctttttctttcgagacagaatcttactctgttgcccaggctggagtgcagtggcacaatcctggctcactgcaacctccgcctcccaggttcaagcaattcttgtgcctcagcctctccagtagcttggatcacaggcatacaccaccatgctcagctaatttttgtatttttagtgaagacagggtttcaccgtgtttgccaggctggtgttaaacttctggcctcctgtgatctgcccgcctcaccctccctaagtgctgggattacaggtgcgaaccactgtgtccagacacaaaacatttcttgtagtggtcttttataggagacatttgcagataatgttccagaacatatttctccataggagctttgcatttcctgatatttcagaatttgcatggatctatgtagtaatgagttaggagcacaatgagctacaccaatagatgtgtagttaacgaagcatgtggttgaaatagaaagtgtaatttaaaatggaattactagcaccagaggaatttgaatgctttgttgttggtctgttgtgttaggcctgattcaagaatcaacatatcaccaggtgtggtggctcaaggctgtactcccagcactttgaaaggccaaggcgggtggatcccttgagtccaggagtttgagaccagcacgggcaacatggtgaaaccctgtctctacaaaaaatgcaaaaattgtgtggtgcatgtctgtagctccagctacttgggaggctgaggcaggagtatcatgtgagcccgggaggcagagattggagtgagctagtgagctgagattgcacccttgtaccctagcctgggcaacagtgtgagactctgtctcaaaaaaaaaaaaaaaaaaaaaaaacccaaaaccaaaaacctgtcattgacaagaatgtgatctgaagatcatgagagaagactacagttgggactagaattctaagaatttcattaacactttattcttaaagatttcattcagatgagtataaaatacagctctactttagtaacaaattcctccatagaaattgacccaatagtcccatagacaggtttttttgttgttgttgtcgataaacatagcaattaacccttctggtcttaaagcttaaaacttaacatttgttttatctgagttcctaacttaggaaacaaccctcaggattctgaaaaaatatcaaataactgaaactcaccagattatccatctagacaatgaggtgccagacccctcacttgtcataattgcttccttacctctcagtagttcctgttttcccacacaaaggtacatttcttccctgctaggtaaacccctaatttcagttggtcaaggaaatggatttgagactgctcttccaccttctcagctgcagcacctgattaaagccttcttccctggcagtaattggcatctcagcaattggctttctgtgcagcaagcagcaggacgtagaccacagacccttggagttttggtaatagcatcacaagaagtttggtaggttgtccatgactggtacaggagctgaatcacatgatcaaagcccaggctttttctttcttcagatgccaccattttagggtttggctattgtcttcaaacttgcaaggcatctgcttcatttcaggaatcatatctatgtgcaatttgggaagaaaggtaaagggtcaaaagccttcatgagcttttctttttttcttaaaagtgttattattttttggcaaaatacaccatccataaaaagagttcaaataataaatgtataatatgtgtccacacatatatatgtggttcaaagtatgatgatgtaatgaaaacctgtatccacctgtcctagaataagaaatagaaaatatttattttctattgcatggaagattgcctacatgggaagttccttgcatccctcctctattccatctccctctctccttatcagagataaacattgatttgtgtttttatcattttcttgcttttctttaattttaacatatatgtatgcattttaaagcaatatgttttttagttttgcatgttttgacctttatgtagaatcatattctatgttttcttctgcaacttgcttttttgctcagtattagatttgagatagttatccatactgatgctattcatttccactctcacagtttttccattgtttgaacatatccttccaattttagttgttttccttttctttttcttttctattttaaggaatcaggctattatatgtctccttgtgcatgagtggaagattttctttaaaggacatatatctaggaatggaattgctgcattttaggttgtgttaaatttcaacttttctagataatggcaaattgttttccagttattgtgtcaatcctctttaccattagcaatgtttaggattatctgaaactgtaaaactcctagaagaacacataaaagaacagcttgttgacgttggtcttggtgttgatttcttggacatgactccaaaagcataggcaacaaaagcaaaaacagacaagtgggactacatcaagttaaaatcttcacagtaaaggaaacaacagaatgaaaaggtaacaaaaagaatgagagaaaattttttttttttaattttactttaagttttagggtgcatgtgcacattgtgcaggttagttacatatgtatacatgtgccatgctggtgtgctgcacccactaactcgtcatctagctttaggtatatctcccaatgctatccctcccccctccccccaccccaccacagtccccagagtgtgatattccccttcctgtgtccatgtgatctcattgttcaattcccacctatgagtgagaatatgcggtgtttggttttttgttcttgcgatagtttactgagaatgatgatttccaatttcatccatgtcagagaaaatatttttaaaccatatatatatctgccaaggagttaatttctaagatatataagaaactcttttttttttttttgagacggagtcttgctctttagcccaggctggagtgcagtggcgcgatctccgctcactgcaagctccgcctcccgggctcacgccattctcctgccccagcctcccgagtagctgggactacaggcgcctgccaccacgcccgggtaattttctgtatttttagtagagacggggtttcaccgtgttagccaggatggtctcgatctgctgaccttgtgatccgcccgccttggcctcccaaagtgctgagattacaggcttgagccaccgtgcccggccagaaactcttacaactcaataacaacaaaaaataggcaaaagatttgagcagacatttatttaaagaagacatgcaaattgccaacaaatatatgaaaagatggtcaacatcattaattatgagggaaatacaaatcaaaactacaatgagatatcacttcatacctgtaagaatggttattataaaaaaaattgttgatgggaatatcaaatggtgcagccactatagaaaacagtatggagaatccttcaaacattaaaaatagaaccatatgatccagcaatcctacttctgggtttacatccaaaataattgaaatcaagatcttgaagcgatcatagcactcccactttcattgcagttttttttcccaccataaccaggatacaaccaggataaccagaagcaacacaaatatccatgaacagatgaacggatgaaggaaatgtggtatgtacataccatggaatacagttcagccttaaaaaaagaaggaaatcctgtcatttgtgacacggttcaacctggaggacagtacgctaagtgaaataaaccagtcacagaaggacaaatcctgcatgattctagctgtataaggtatttgtaatagtcaaactcatagaagcagagaatacaatagtggtttagggactagggcatgggagaagtggggagctgttgtcaaagtgtataaagtttgggttatgctagacaagtaagttctagagatctgcacaatatggtgcctatagttaacaatacagtcttgcgcacttaaaaattggttaaaaggggccgggcgtggtggctcacgcctgtaatctcagcactttggaaggccgaggcgggcagatcatgaggtcaggagagggagaccatcctggctaatatggtgaaaacccgtctgtactaaaaatacaaaaaattagctgggcatggtggcgggcacctgtagccccagctactcaggaggctgaggcagaagaatggcgtgaacctgggaggcggagcttgcagtgagccgaggttgctgccactgcactccatcctggacgacagagagactccgtctcaaaaaacaaacaaacaaacaaacaaacaaacaaaaaacaattggtgaagacgatagatctcaagtgtttgtactgctaaaaccaaaacaaaacaaaacgaataaacaaaacaaaaaaacaaaagggcacaagaaaactttgggcaagtgtttgatatgtctattatcttaattgtgatgatatcacaggtgtttgtatttatttaaacccatcaacttgcctacattaaatatgtctggttctttgtatatcaattatacctcaatagagttgttaaagatttccttttccccacatcattgccaacatgactcatttaatttttattagcctgatgggtataaaacagtatctctcccagcgctttgggaggacaaggcgggcggatcacctgaggtcaggagtttgagaccagcctggccaacatggcaaaaccccgtctctactaaaagtacaaaaattagccgggcgtggtggcaggctcctgtaatcccagctactcaggaggctgaggcaggagaattgcttgaacccaagaggcaaaggttgcagtgagccaagattgtgccactgcactccagcctgggcgacaagagtgagactccatctaaaaaaaaaaaaaaaaagtatctcgatatgttttacttcgtatttttcaggttacaaatcaggttgagtacattttatgttttttggctatttatgttttctcttatgtaaaattccagtataagccttctatccatttttttctgtgctttttttttctccctatttttcctctactttaaggagttcttcatattttctgaattctggttctttgttatttatgtgttacaagcgcatatttccattttgtgttttatctttacatgacctttacgatgtcgtcttggctgagataaaattgataatttctgcctaaagtgttttccttttaagtttgtgtgtttgggttccatttttaaaaatctcttacctgagatcataaacatattttctctaaaggtttttaagtttgtctttcacatataagtccacaatgtatttgaaattgatttttttgaagatagtatgaagttgggatacacttttattttttcaatgtagatcttcatttgttccaccattttactgatgtgtaatgccacccacatgtggatgtgggtctatttatggactctctattttgtttcagttaactccattttgttgacctaaaattgacttcccctgataactatggctctataataaatcttgctttctgatggtcctcttcaggagtaccttggctatttgttttatgtaaattttagagttaacttaccaagttctgtgaaaaatcttattggtattaggattggaatttcattaactttaaaggtcaatttggggagaaagtatttatgtacttacatatatttatacattaaattttcacatctaaatacatagcatactgctgcatatatttagtgttctaaaactataccactttaaaaagaattaaaataaggtatctaggaataaatttggaaaatatatgcaataacttcaagaagaaagtttaaaaaaccttattgaagatacatttcttaatattttgtttatgttgtaccgtaacacaactgacttttatatattgattttatatctaacattcttgccaaaccctctttttaattatgatagtttttcggcatattcttttggattttttttttgtagatgagcttttccagtgaagtatgttcacttcgggtcctatttgctaagtatttttttttaaatactgagttttatttcacgtgtatatttttgtctccccaccatttccatgtctgaccactgctactactatgtcctatcataacattccataccaagcaaagggtggagttccatctttaaaaactaaacaggcattttgggcaacatattcttggcaatggaacttggacaacatttatcaaacatggtagggaaagttcttactctgcattataaaaaggacagccagatatcatctgttacagaaatgaaataagacggaaaatttttaacaaattgtttaaactattttcttaaaaagacttcctccattgccagagatcttgagtagcctcctgctcagtcatctggaagtaattcttcacataattgatgaacttggcttccactttgggaagagaaccacctttttctatacttacttgcatttttgctataatgtcttctacagaactaggtccttttggtgttttgggagttttttcttgttttttgaaggattcttgtccttttgatcttggtgttgatgatggttttgagccttttccattctgatttgacttttgtgcatctttggctcgagtatctcatatagattactcgtgcttttcttcagcttcctcatcatcaaaatcattatcattttcatcatcatcatcatcatcatcatcatcatcatcttcatcagcagcaagttttccttttttctgtggaaccttgctaccacctccagaggcagaccgctttccagatatgcttaagaggttcacatcctcctcctcttcatcttctgactctgcatcttcctccacagctactaagcactgtctactaatatgcactggccctgaaccacacttcaactgtaagaccactggtggtgtgatttcaaagcccccaagggaagcagttggctgtacagacattttcaaagttgccagtgtgactttaattggactgccttcatcattcatggcctctgcttcaacaatgtgcaattcatcccttgcaccagcccctaaactgactattcttaaagataactggtctcattttcatcattatccaccttaaagtgatcatctttgtcggcctttagttcacaaccgaaaagatagttctggggcctcaggaggctcatgtccatgtccatcaaatcttccatcgcgtggcagcatgcacttagatgggagaaaaggcagatggagataaacaaccgctgctcaagagaacagccacgcaggatggaatcacaccagtttgctaagcattctttaaaaataacaatgaacattggactaaaacaagtattttttcatctttttattttaaaagctaatcttatggcttttctaattttaatctattaatatggttgtgatggccatgcaaacacgttaatcagacatcctgatgcagggaacacaattgcctgatgaccccggctgctatcctactggatagcactgtgttcacactgaggccaaacttcctgtgggctgcttccagccattggtgaaccagggtgaaagtactcatgcaggactatttccacaagacacaggactccctcgtgggcaactttggcttgcgaactccacattggcatgtttaatgtgctattatttattgtcaggtatatatttaagtttctttattcttacgcaccgaatagcaccactggacttttgttggaagtctcaatctcccaaaataaacactttatgtgttttctcttttaaaaaacagatttattgatgattcaatcctccaggatacagaggataaaatgagaagaaccatatctctgaaataattgatcagcaatgaatagatagttgctgtgaaagttaagccaacattgggggaaaaagtgattataccaattttacaggccattgaatagtcaatgaggccaacattgggtttgtcctatatatgaaaactcatttcacaatgttttttggggttttcttatgaccagagactccaaaaggattgatgatacaaagtgatgggcatttcttaaaatgaaatcttgagaatgtgttgaaaatgattatagtgaggaagaagcggaaacaacgaacagagacagcgaagtggtagaggagtttgctggcgagcgcagagtttaaaaggacacacccaagcaatggaaggtgagaaagcagccaaatgtcactgggtcatcagttcttatatttttttctcatgatgttttctcttttccaattatccctgtttgagaaagaaagcgaccctaagcttccttgtcttggaagagatttgtagtgtggtaaaatatctaagactttctatcttttgtttccaagaatttgaggcttccttaagcaaaaaggaagacagctttcttgggtaggggcagagtgtctagggagcacaggactttcccaggttagaaagagattgtccgtaggacggtcggaggaagagtggtctgtagggtccttgagtcgaggtcacccgtgcactgcactctggctgtgcttgttcaaagccatatcccgtgattttctagcacagactttaccactaggcaaaagctcataagtattttttaaatgtgtgagcgtctgaaacatggaatgcaatgactcgtgaggaattctaaggataacacaaagaacttttgaagagcttcctaataggagaaaaaggaaggagagcctactatttggccaggttggtatatcagatgacactaaaaagagagagtcactcaattctgattttatttccctgttttttagaaccggggcatgtgaaataaactaacctctcaactgaggcatgtgaagtaaacatggctaagaggattcttcaggctaagggcgctggttcgtcttcatctctacccttctctgtgtcacacgggctctcttgctaattgccttcttgttgggtttggccagtgggaagcactggtggacagttcggagctgggtgagagagaagctggggtgtttcttcctagcaccctccccggctttggtgtctcattccttcacaccaatggaccctcctgttccagtttgtttgcagacagttctagcaacaacacttccttctcttgccctttgggcttaaggggctgtgctggctattctttgctcttctgaatccactcacccccatcctccagcttgctctgtccccaggtggctctcctgtatggacttcactaaaagcttccctttcctctggcatccaagtgggctcggccaataagaggcattagctggatttcagagtgaggagggtgagattggggcattcactcccctgtcctcatatacctctgacaccccctccccaacaatgctgggttggctgtggacagtgggcctctacgaaaggccacacagtgctgctgtcagggctgtcctatactacaatctctgtggattctaacaatagtttcctccacttattcattcagacccagggatattcacttcccctgtccttactagcccccaagatattgaatcatcacttcttgtatatcttaaacactgcccacagctttgtaagtggtcccttccctcaattacctagtttaagtgggtcatctagttctttctgccaccctgactcattcagagtcttaaccagctttccattatctctgggggctgcaccatccctgtctgtttccttaactctgcccacatccctgtaagttgtccttctattaaagtctcttcacattatccctctggggggtgaggaggggattctatgtcctgccgggaccctgagcgatacactaaatgaggacatgattagatatttacttgctgcattgagggaatttacattctcaaccacagacagattataactcacagaactgaagtcacttgcattatttgcactctcaaatcattattaataatttcttaaaagctgtagaggctaggaaacatgataggaaactagaaatgagcagcttggtacatgaagtccccccaaaggagagaaaagtggcttccagcaaattcatatccatgaaaacataggttcctagtaaaatgccagaataaattcttaagcagatattttatgattacttagaaagagaagtagtcatcaccaagaggtcattatagttattcattaagagaggagtaaagattttacatctttcataagatcttcagtctaaagagataagagaattgtcagcccataatatacattgatttcaagtaaaatttgatgaaatagctcatgctattttagagaagaaatggatactgactgaggcgcatttagatggatcaagtgatagtctgaatacttgcatccaaagagaactaattgattagtttcaacctggaagtaaatctcctggggtcttctccatggctttgttttcagccttatttaaaaatttttggctgggcgcggtggcacgtgcctataatcccagcactttgggaggccgaggcgggcggatcacgaggtcaggagatggagaccatcctggctaacacgatgaaaccctgtctctactaaaaatacaaaaaattagccgggcgcggtggctggcgcctgtagtcccagctacttgggaggctgaggcaggagaatggcgtgaacccaggaggcagagcttgcagtgagccaagatcgcgccactgcattccggcctgggcgaaagagcgagactccgtctcaaaaaaaaaaaaaaaattttattggacactgatttgaatgagcacacagaatgcacctttgttattcacaaatttgacaaattgtggggaagcggataatattctgggttataaaatcatgatttgaaattatctcaaccagttggaattttagacttaaaaatgaaagataaaatgcactagagagaggcataaggatcggaagggaggaaacaaagtgtcatcactcacagataacatgactgcatatgtagaaagtctaaaagaaacgacagacaaattatattgatatatgaatttggcaaggtctctggatacaagacatatatacaaaaatcattgtatttttatataccagcaacaaacaaatagaaaataaaatgccaattgcaacagcaaaaaaactattaactacctagatatacatgtaacaaaagacacatgcaagacttttactctaaacattacaaaacattattgggagaaattaaaagaacgcctaaacaagcagaggaagagaccagactaatgggttggaagactcagtattataaaaaagtgagttctggccaggtgcggtggttcaagcctataatcccagcactttgggaggccaaggcgggtggatcacctgaggtcaggagttcaagaccagcctggccaacatgatgaaactccatctctactaaaaaatacacaaattagccaggcgtgatggcaggtgcctgtaatcccagctactcaggaggctgaggcagggagaactgcttgaacctaggaggtagaagttgcagcaagccgagatcacgccaccgcactccagcccgggcgacacagcgagcgagacttcatctcagggggcagggggcagggcggggaggggaagaagtgagttctacacaaataaataaatagattcaacaaaattccggtcaaaacactacagattattttgcagagattgcccaggtagttcaaaatacgtgtggaaatacaaagaacctacaatagtaaaagtattttagaagcagaaccaaattaaaggatatacatcatcagatatctcaaggctgattaaaacatgtagtattggcaaaggaaaagcaaaatgaccaaaagaaacggaatagaaagtctagaaacagaatccgcacatgcattttgcctgacttatgattaaaaaaaaaaaagtccttcaatgcatcctttaacagaaacgatggtcttgtcaatacaaggtgttgggtcagctggatatccaaacgaaaaaagtgtattttgatttctgcctcataccatgccccaaaattttattccaggtgagttgtcaatctaaattttaaaagtaaaacaataaagtttttaaaaggaaatgtagtagaacgagtccatgattctggagtaggcaaggatagcttaaacaggacatgaaatgtgctaattataaagaaaaaaattggttaattagactatattaaaattaagaaattttgttttatcaaatataccattaagagaatgaagaggcagtataattacataatggagtagttctaacaacaaaaatgaaccaacaatagccatacaagacactgtggatggggctgggcgcagtggctcacgcctgtaatcccagcactttgggaggccgaggcgggcagataacgaggtcaggtcaaggccatcctggctaacatggtgaaaccccgtctctactaaaaatacaaaaaattagctgggtgcggtggtgggcgcctgtagtcccagctactcgggaggccgaggcaggagaatggcgtgaacctgggaggcggagcttgcagtgagccgagatcgcgccactgcactccagcctgggcaaaagagcgagactccgtctcaaaaaaaaaccccaaaaacctgggcgcagtggctcacgcctgtaatccaggcactttgggaggccgaggcgggcggatcacgaggtcaggagatcgagaccatcctggctaacacggtgaaaccccgtctctactaaaaatacaaaaaaatagcggggcatggtggcaggcgtctgtagtcccagttacttgggaggctgagacaggagaatggcgtgaacccaggaggcggagtttgcagtgagccgagatcgccccactgcactccagcctgggcgacagagtgagactcctgtctcaaaaaaaaaaaaaaaaaaaaaaaaaagacattgtggatgaaacttacaaatgtgatactgggcaagagagtacacacagtatgattccgtgtatataaaacgcaaaacacaaaaataatctggctgctagaaggcaggggagtggttactcttgggcagacagtagctgccagagggtgtgaaggggcttctgaggtttggtaattttttttttgttagttacacatgggcattcggtgggtgtgttaaaatgtattgaattaattcacttatgataatggcacttttctgtaggtatgtaattcatgagtaaaaaatttaaaagttaataaaaataaatacaacgttttgaattaaagtgcaaaagtgcaaaaattaaagtgcacaagtagcagcctggtgtgtctggagttggttccttcctgtgggttcatggtctcactcacttcaagaatgaatccacagaccttcacagtgttacagctcttaaaggtggcagggacacaaagagtgagcagcagcaagatttattgtgaaaagcaaaaaaacaaaggatccacagcgcggaaggggacccaagcaggttgccactgctggttggagtggccagcttttattcccttatttgtccccacccatgtcctgctgattggtccattttacagagtgctgattggtgcattttacaaacctctagctagctacagagcactgattggtgcatttttacagagcattgattggtgcattttacaaacctcttgtaagacagaaaagttccccaagtccccactcgacccaggaagtccagctggcttcacctctcactgaggagtcaggttaactaatgttagataccacaacaaacagactgtgaaatttcagtattttaaagagtagacatttatttctcattgatgcaaagtctgatgggaagcctaccttcacgtggaatgtgtcctccaaggtatctgcagcaggggaagagaggaatggaagaggcatactggcttttaactgccttggcccaggagtgacactttatttctgctcctgaaactataaacatggatggccccaaccaaactgtgagggaggctgggaagtgcaggaaagcaaatgggatatttggtgaacactgactgtgccacacttagcttgatggcagttggcttgaaaaatactgcagtgtttttagttaactacaaatgtagcttgtgccacctgtgtatgtgtaatgtggttgctaagcataaggcaactttggaaagcactaaaaaaaataaatatggtactcaggaaaaaaacaacaacaacaaaagaagaaagtagttttccagttttattccatcaggatcaggtcacatttgaaaaattgtgttcatttctggatatcaccttttaaaagtgatattgacaggctagtgcatgtccagagaatggtaactacaaagatacattagccatggcaggctaggatatattgcagtgataaataaacactcaagctttttttttcttttttaagacaaggtcttgctctttcacccaggctggagtgcagtgtcgtgatcatggctcactgcagcctcgacctcctgggctcaacctatcctcccacctcagcctcctaagtagctgggactacaagagagccaccacacccagctaatttttaagttttctgtagagatgggggtcttgctatgttgcccaggctggtctcaaatgcctggactcaaggagtcctcccaccttagcttctcaaagtgctgggattacaggtatgggccactgcacctggcccaactctcaagtcttaatggcttaatacaacactcatgccacagtctgacaggtgcacgagaggtagccttctatgtgctgacgcagggattcaagcgtcttccatctcacagattccatgcctcttatgtgtcctgagaattttccactggatcctctgcactaagcaagtcaatgagtgaaagagatcaaggaagatctcataagacacatggcctggcatagaaatagcacacatacgtttaatcttgctttattggccgaaacccagtcacatgccccaacccaatggctagggtattcttgtatgcccaagaagaggaaatgggattggggagcatctagctagctctgccacagatggtgacagatccaaagtcatgtgggacacagttgaaggaactagataaagtcaaactggaaaaaaatgatacctgttctcaaatatacctccctcaaatattcaaagtgctgttgtgtggaataaggaatatacttattctggatagcttctgaaggcagaactaggaagaaagagtgagacaaatgggacaaagttttatctgtttaatataagaaagaacttgctatcaatagagctgttcatctcagagcagattactctgtgagtactaataaatactattttattaagtgcttactatgtgctaaattcttaaatcatttggttataataactactcttgaaatagtactactaatatccatactttgcagatgaagaaactggtcttagagagattgtgtaagttgcccaatgacacacatatagtaagaggcaggaccaggatttgaatcctggtctttttgaacccaaagtgtgtgcacttaaaccctaggccatactgcccttaaggaattttgttattaggtggtgtggataataacagttcagcagggatatttcaaagaggatttcttcattgtatttgagttggactgaaatggaagctgtctcatgataggtatgtataaagaaacttctgagtactcacttcagaagcacatatattaacattggaatgatacagagaagattagcatggtctctgtgcaaggatgacacgcaaattcctgaagcattccatatttttaccacctgaatttttgtaaaaataaaataaataaaataatttaaaaagaaacttctggggacattgaaagagtcagttaagtaactagtgctttggtgttgggtgctgagggaagcgcaggactcatacagggaagcaaagttaagcaaaattcattgctgttccaactaaaacttcaccatgagtatgtggttgccataagtgattaataaacagtaggaggtttgggggtgaaaatgactcatggggctacgtcctatgcatgagggtttggctaccaccaaagcaaatcttgatacagccactgccaggaatattgctgggcttcagctggatgctcaacatctccccctacaggagtcagagatgcaaatcctctacttgtgttggctgtagtaatttgtttagttcacactcagtcacatagaagcaggcgctggcagccttagtaattttgtcaggtagccatggagactctatgttgcttcagaaattcatggtctacaaagggcgagtggattctgaaagcattggaagcgcatcataattccctgtctctggcttgcatttgtaaaagcagatgagcaaaacaaatataatcggacccaagtatccaaacctatgaagagacccattgcacagaacacagtactactagtcctgcatcctacaacaagcaagttcttatctggactcaagtggctattcaggaattgctgcatgccaagaatacaacactgcaagaaaatgctctctagtttgtaaaaatttataccctgtctaaagtggttcagaagtcactgcctatgccatttaaatgtgaaacaaaacagagttcaccccaaaggagaagaaacagtaaatatatatggagcacagaattgaacagactgccacacttaggtaagaaaattgctacacgatttccagtagctaaagctgtaagagaaacacagttatatatttttcattttctgacaacaggaagcaaataaatccatcagcagataatttttttttctccatgcaaataaatgaaatgaccaatgaatggtatgggttcttgtataaaatacagagatttatggagtgaacagaatcttaacttcagtataaaagatactgaaatgagccctcagatggctcttgaattagacatccataaagacagagagcataactttaagtaacaatgaagtcatttttgtaacaggctctgttgacattgtgcagaaattctttttccagggtttaagttaatagagggatagaactgtgaagctctatatcagggattctcaagctttagtgaatgactttgggagcttgataaaaaggtggatccttaggcccctttcccagagctttggattctgtaggcctggagaagggcctagaaatctgcatttttaactctcaccccaccaagtgcttgagatggaggtgggctgtagatccgattttgagaaacacagatggggtgacataagtggactttgagcaggtgttaggccaagatctgtttgcaatgggagggaaactagctggaagcatttcacagcctctgtgcagctgaggctcatttggaagaagggctcaaggtctaacgtgggccaggaactacactagatgcttgcatacactgactctcataaagaaccaagaagccacaggcagcatttctcttcacaacacattagatttgatgtctatttaaattatctgccatgaattgcttagagcaaaaagcttactataacattctagttacagaattatgtgagcattgtggtatgtccagagtcccaggaatgttaagtgtgtatccctagatggccccattttttctattgctcacagttatgaaacatagtttaaaacttgtgtccccatgaaaggaatttgtgctttgaagttcttcctacatctgagaaatctaaacatgccagtggtcatcataaagtaaccctgtgggcctgagggggatgtgggtgtgcacgagtgatgggcagggaagctgcggacaggattagagagcttcttccatttttcccattactggtcaccacaggtcgtgctggtttgaaaacagaaacaaaacaaacaagcaaaaacccacctagctttttgggttaaagaatggttaactttggggccgggcgcggtggctcatgcctgtaatcccagcactttgggaggctgaggcggacggatcacaaggtcaggagatcgagaccatcctggctaacacggtgaaaccccgtctctactaaaaatacaaaaaattagccaggcgtggtggcgggcacctgaagtccctgctactccagaggctgaggcaggagaatcgcctgaacccgggaggaggagcttgcagtgagccgagatcgcgccactgcacttcagcctgggcaacagagcgagactccatcttaaaaaaaaaaaaaaaaaaagttaactttttgggtttggcgtcggtgcacatctctagtcatgatagtgtgtccggaattggtgagttcttggtctcactgacttcaagaatgaagccgcggaccctcgcggtgttacagctcttaaggtggcttgtctggagtttgttccttctggtgtttggatgtgtttggagtttcttccttctggtgggtttgtggtctcgctggctcaggagtgaatctgcagaccttcgcagtgagtgttacagctcttaaggcagcgcgtctggagttgtttgttcctcctggtgggctcctggtctcgctggcttcaggagtaaagcggcagaccttcacggtgagtgttacagctcataaaagcagcgtggacccaaagagtgagcagtaacaagatttattgcaaagagcgaaagaacaaagcttccccagtgtggaaggagacccgagtgggttgccactgctggcttgggcagcctgcttttattctcttatctggctctacccacatcctgctgattggtagagcccagtggtctgttttgacagggtgctgactggtgtatttacaatccctgagctagacacaaaggttctccaaggccccaccagagtagctagatacagagtgttgattggtgcattcacaaaccctgagctagacacagggtgctgattggtgtgtttacaaaccttgagctagatacagagtgcccattggtgtatttacaatccctgagctagacataaaggttctccaaggccccaccagagtggctagatacagagtgtcgattggtgcattcacagaccctgagctagacacagggtgctgattggtgtatttacaatctccgaactagacataaaggttctccacttccccaccagattcaggagcccagctggcttcacccagtggatcccgcaccggggctgcaggtggagctgcctgccagtccaggtgtcgtccgccggcactcctcagcccttggctggtcgatgggactgggcaccgtggagcagggggtggcgctcatcggggaggctcgggccgcacaggagcccacggagggggtgggaggctcaggcatggcgggctgcaggtcccaagccctgccccgcgggaaggcagctaaggcccggtgagaaatcgagcgcagtgccggtgggccggcactgctgggggacccagtacactctccgcagccactggcctgggtgctaagcccttcattgcccaggcccgcagggccggccggctgctccgagtgcagggctcgccaagcccacgcccacccggaactccagctggcccacaagcgccgcgcgcgcagccccggtttccgcttgcgtctctccctccacacctccctgcaagctgagggagccggcaccggccttggccagcccagaaaggggctcccacagtgcagtggtgggctgaagggctcctcaagtgccaccaaagtgggagcccaggcagaggaggcgccgagagcgaacgagggctgtgaggactgccagcacgctgtcatctctcaataggatgcaggtcagagggcaggggtaagagggaaaaacacctgattgcttctaagagtctaaacgaaggacacatcccaccagtggtggtgcaccatgaagcatttgaaggtccatataagacatttcgaagccatgaatcttgtttgtttattaaaatttttttttgttataccggagcatagagatctatcttggggcaaagtttcagaaaataagtaaaagtccagttttctagattcagaactatcaaaggctagacaatggcaatcaataataatgctcccctccataccaatttgaaaagttaaaaattttatcagacatgcagatgtcttcacattatgaaacaattgtaacatttttttctccttcattaaatggccgatttgacagctgtttcaactcaacactcttattttgattatttgttattcaacatttggccctgatagtattgtcaattctaaagtgctaagactatatttaaatcaacggaaatattttggttatgttttatttacgggacttttctctgcttgtcttttaacctcccttaatagcaggcagccaaattattagctcatctattttggcagaataaaacaattcatggtttaaagagtttggaaaaggtaaaacttcagagaaatataacaacatccagcttacaatgctgtttgtgtactttctataggatgtgtagcttcatcctgtaggaggatttcctccatttgaatccccaaggcctctgactgatttccctcttcctttggtgctgtttgtgtttaaaaaataatgcctgagggaaagataaccatcgttctgttgctttgtggacacatgcattctcatacaatttctgttccctattccttgtcagtgatgagatgaagaattgagtgtaagcacatcaaaattgcacagtaagtggtcaggagtctttcaaatagcgctaaaagaggctgaattgccagtgaggaaggcgcagctggaagctagatattgcatcatctggccttcctctgctgaacaaagaaaattattttgtgaagtatgtacagatgctcttatttcaagtgacataatgcatttgtttcaatggaggttttcaatctgcaactttgaaacttttctgcatgtggaaaaccccatgacaattcgttgtaccctagggtacatctgaaagaaaattgttggatcttaaagccaaaccagcaatttggacaaacttggaggattatttttctgggatgtttccatttaatattacaacacagaggttctgcatttatgtcaaaagggaaggactagaaaaaggctttctgtaggccatgaaactagttatgctttgcgattgtaaatccatattgaccactataattcaagtgtttaacttgcatattcttagaaactgaatttttcagaaaagcaagcatcaatataagcttctaaaatcaaagctaatttagtcatttatttatgactaccaggttgaagcttcctttaaaaatcctatttcatacagagcaacaaaaacagatgacaaaatctaaatatttttacgtttattctaaagattggtgaaaagtatattgctggatattttatcaccatgagttaattgctcgagaaataacctccagatttaataaaagaaaagaggaggttcttcatgagctagttaaaatcatggatatgccccataacccacttctgtcaggtagcaaggttgcttatggaaagaagagccaaagaaattgtttaagcaggccaaggaattgaaaaagtggaaaaggagaaggttgtctcaactgaagtcactagtacctttctaactcagaatcttggaggaatttctctgcacatctcttgtcctttacttgacagaccaaaataaaccgagatgccagaagagtttgttcagattttttagtttagtttcagttccccagtttttcagaattgaaggccaacaatattccctccacacgatgattcacctctctaccccttcatgtttctttaacttcattgcctactatagtaagtacacattgccctggagtcaggtggacttaagtaatcaacaagaatatatttatgacctactcttcaaatgccctgtgctaggtactgtgggggtcatatggaagtacctggatttttacagtcctcaatagggtccttttgctttagcatagccagttcacttgctgtctgtgcccaggacttaaatccctccctctggaaactgcttacgctttctacctgcaataccttccccacaccactctggcagttcctagccttcaagtatagttcaaaattaacttctttcactcaccccactttgattttttctgtgtcgcctctgaacacagtccctatgaactccttgaatgtggagatcacaatttattcatgcttgtgtgccttgtgccaagaatagcctaggaagaaagtccataagatgatacataccttcatttattttcagtgaaaggattggtctgaaaaacgggcctgccattattggaaatagaaaagcattaatctctttgaagaacatcatgttgcacattgaccaaagggctggaaaaaaaaaaaaaaaaaaaaagaacaccatgtgccctgatttccttatcacttttccacataatagtgttttgcttgaggagaagcctctaagattggttattttttacaagtttgttttttgttgatcccaacatgcaaatatatctgttatctatggatttgttcactctttgacataatcctctaaactctttgggagttttctgccctcttgattaggaagcgtttatttaaaatatcagtttttttgaatgaacttagtggaattatgtagtacaattttagactaacttgtaacaagacaaaatgccaaaccttaaaagataatcttttaatcttaaatttagggtctagactttgtttctttgtttccttccttattttcccttcccacggctggctggatgacttgaccatttacattatatatatacatatatatatatattttttgagatggagtcttgccgtgttgcccaggctggagtgcagtggcgcgatctcggctcactgcaagctccgcctcccgggttcacgccattctcctgcctcagcctcctgagtagttgggactacaggcgcctgccaccatgcacggctaattttttgtattttttttagtagagacggggtttcaccgtgttagctaggatggtctcgatctcctgacctcatgatccgtccgcctcggcctcccaaaatgctgggattacaggagtgacccaccgcgcctggcctatttacataatatattaaggccaattcattttgactgatactaaaggtagacttgaaccttgtaattgataatcacttacacagtgtttaccatgtgctaggcaaaggctttgtgtgtattacctcatttagccctcatagctctaggaagtaggttctattattatttattattgttatcccctttctccttttatatgtcagtctgaatgcagattctcctattttcatgattgaccttcagactgcaggtttagcagttgctaaaaaacaaaaatcaatccagctcctatttctgccccaagctgccaacaacaagggttggggaaaacttttccaggctgacaattattgttaaaagcagcttttcctgtaggctgtctggcagtagcaggaaagcaggctgagtatcccatgattgccaaagcaaggagggcttctggtggaaatggacttctttgatatatttttcccctgggctgatctgcttttctatttctcctctttcactggtgtgtgtgtgtgtgtgtgtgtgtgtgtgtgtgtgtgtgtgtgtgtgtctatgtttatttcaggtcatgatctgcttcttctgtcctgaaaatgcacttggagctctatccatagaggtaatttcaaagtttagaagttgtgttctgagttttatgtcacaagcaaatgctctgatttccaaacatctgttctctaggcagtgttaaaattcattatcctgacaattgcccttcggcctatatgccagggcagctgaagccaacccaccctggattccacctactactctttaggatgagacaatagtaatttttttatgaatcacagggaaagtcagtgaataatgtccttgacatcatctttactgcaagtacaataacaagtttcacagggccattctttacaatacactttaatatctatgacgcaatgccaaaactcacatcagtgaaattaattctacaaggcacaaaacacaagtgtacaaatttctgatggtttgatttgaggataaacttttagtgtgcccaatgcaatgaagagtccttcacaaatattacttctagtgaactctaggttatactcctggataagcctttaaggctgtgaggaacctgagaaatccactgaaaatttacatctaaatacagtcatccaccttctctaatcatgtgctgtgggagaatcccagtaagcagacagcacttctagatgttcttataaaacaactagagttgaccctagcacagaagaatggatgactgtagacctaaaaaaacataagccccaaattcattaattcagccatgattaaaattaagctgaagtcataaattaaaatctttagtaataggaatcttgagataataaaaaactgttgatacatgtgtttgggaatacaaaactctgagttggcttcttgacatcttgttgtgagagataagaaagcaggttagaaaatgtttgcctaccagggaccataaaatttgggttagtttctattccctttcttcttattatattgagtttctgtctactgctctttgataaaaagaacaaagactttttctgaaataatggaattttaatagttttaatagtttccaaacctgctgacttataatcttgggactttgaatgtttgttataaaagattacatttgtagagtgttcaatgaggaaagctgttaaagtagaaaatcatttttcatagaaagttgattttattcatcaactgtgaagaaacttccgttgtaccagtatttattcactccttccatagcgacaaaattcgtagctgggtacaaaggtacctaggatataggcagtgaggtatgggcatgtgactaaataatggccaatcatatgtgagcagaggttaatttgtaactttgtgaaaatgttctcaaagggaaaagagtgtcctactggggtcctctttcctgcgcttgtagtgtggatggaatggcaagtcaccttggaaaatatagacaaggacagaactacagtgctgctgagcaaagatagaaggacctgggtttctgaccccatagaggggctcatacctgcctaagacctcttacctctggactttattcatatgaggaggagataaacagctgttttatttaagtcactattgttttgggactatttgctaaaccaaatcctaacaaataaaccaactttgtgctaactgatctgctgactatgacctcattgattaaattcaaatgaacctaatcaaatggaagactctccagatcatctggagacacatacaatttctcagccatccctagatctttgtgtcaccaccacaagagtcgaagtgtctgatgaaagcatctgattggcgaaaccaatgtcctttactttatgtgttaaggatgagggaaattattgggtccttctggcttccacttcaagatacacacagtggggaattaacccctagagaaaaggtgttcaaataaaagaatataaatgcccccagtgctttctgaaccagatcccttagagttggatttactggtgcatcaactaagcaggaagctcttgaaggagatggagttgggtcagatggtgttgggtaaggtgagggagctacttgaaggaggagcacatcctacatcagtgaaggacaacactaaatcgttgtggatatttacataatcaaggtatatattaaacatggaacagggcatgctggaaagatgatggctcagcaagtctcacctttccttctctttaattactaaacactccaacctccaacctcttcctggctaactaggagttggggctgggaggtaggtggagcctggagggcatcagccagagagctgtagctaaacttccaatcctgctactaccctaaagccagataaaacccaggcaaaaccttggggaagatttgaaagctgcagttcctgaggaaggcttggaccatggggcactcagggagaaggttaacattggttagcaggagtgtgcctgtctttttggttcccaggaggctgaaggggaaggctgtgttctctccacttctgaggttgagtgagcatgagaggcccatggagaagaggaatatcctcccaattcctcagcagaggcttagaaactttttcagtgatgcaatgggtcagaagatcagagcttgctgcacttccaacactctcaagaccgctactactaaagtatcttcaagacgagaccaaagaaaataacacttcaccaccggggccggcagccatagagaggaagagtaaataaaataatcaaagaggaccttaacaaaatctgagtaatttacttgcggaaagattttaagcaaacaacagataaatccaaagacctcaagataggagaagatactttggggagaaattaatggtatgaaatgaatcttgcaatatgtatagttaaatggaaatggataactatatccatttaactatgtatagttaaaagtggataatgcactatactatttgactgcatataacctaagagaaaactaatgtagaaagtagctaaaattggccaggcactgtggctcacacctgtaattccagcactttgtgataagaaagaccataaaagattaggaaaaaatctaggagacttaactatataacttggaaggtgagggaagaacttcttaactagacaggcaacacaggagctataaaaggcagaaatattttactatatgatatataaagacaaatatttgcagcataacaaaacaaaacaaaatacaactggatgaggtagctcacacctgtattcatagcattttgggaggcagagatgagaaaatcacttgaggccaggagtttaagactagcctgggcaacataacgacatcatgtctctacaaatttttttattttttgagttggagtctcgctctgtcgcccaggctggagtgcagtggcgcgatcttggctcactgcaagctccgcctctcaggttcatgccattctcctgcctcagcctcctgaatagctgggactacaggcgcccaccaccacgcctggctaatttttttgtatttttagtagagatgaggtttcactgtgttagccaggatggtctccatctcctgaccttgtgatctgcccgcctcagcctcccaaagtgctgggattacaggcatgagccacaacgtctggtccaaaaaatttttttttaaatgagctgggtgtggtggcaggcgcctgtggttccaactacttggaggctgaagtgggaggattgcctgagcccaggaatgtaaggttagagtgagctagttttataccactggctcaaaaacaaacaacccaacaaacaaaccaagacaccaaaaatcctctttaccaggtaagagatactataaacaaactcaaaaggcaaatgagagagttggaaaaaatttgtaattcagatggctatttaaaactcataggaaaaaaatgagcaaataatgtgagtaaatagttcttaaaggagcaaatctaaatagtcaatatgatataagaagagttgagaagatgcttaaactagctagcagaaaatgcaaattaaagtggaaataagggatctctcttctgaactgttgttagcatgaggggtatgaaacacccactgttgatggagacggaaatgcgaattcttatacatttatgttgttaagctcttacaggctgtgaagaaagcaatttggttacatcttttaaaactaaaaattcatatatcctttaatgcagcaatcccaactgtggaggacctatgtcatagaaacataagcagtaggccgggcgcggtggctcacgcctgtaatcccagcacttttggaagctgaggcgggcggatcacgaggtcaggagattgagactattctggctaacacggtgaaactccgtctctactaaaaatacaaaaaaattagctgggcatggtggtgcatgcctgtagttccagctacttgggaggctgaggcaggagaatcgcttgaactcaggaggcagaggttgcagtgagcaaagatcgtgccactgcactccagcctgggcaacagagcgagactccgtctcaaaaaaaaaaaaaaaaagaaagaaatataagcagcagtaggtaagaacatgaatacgagatgtttatttggcattgctctagtgataaaagactggaaatagtgtaaatgagtaaagataaggaaatagataaataagagtacatttacatcatagaataacatgtaatcattaaaaagaatgaaaacaattgactcacagggattgccacaaattattgttgaagaagaaaaatcagatacgtaaagagataagcatagtaggatcccatgcttgtaaagtaaccagtgtcaaaatcctaccatttatctgatgatttatgaatatctgtgtatatatgtatatgcataaatatgcttgtatgtggctatgtgtatataaaaagtacagaagggcacacactggttgttaacatgaggtgtgagggtggagagtaggtcaggataactggatggacatgaatgtaagagatagaagaacgttagaaaaacagaggctgttttaaaagggcccaccatgtgaaatataatcctatttacgtaaaaggatgtatgtgtgtgtatatttacatataaataaattttcaagcaaattaagcaaataaacaattttaagcaaatcgcaaacactgtatagtttcatctggaaatagcttagtaagaatctctaacgtgtctctttatgcatgcttgtagtggtgttatgaaccaggaagaaggaaaaaggtggaaggatgtccactgaattgttagtatgggtctcctcagggggtggaagtgaagtggggggtaggagggatataattagccttgcctttctatgtttttgaactgtattgtttcacttgctgcaataagcagggaaaactggcaatttggtcctttggcaggcctgagaattggaagagcctttaggaatatctgccatcttttctctcgtattcaaggcagcaagtttaagcaattgtggacatcaaatagataaatagcaaactattaggaaactaagggatggcttttaccaaacctgttaaagttaatatttaatagtcagagataccacaaagcaagatggggcagagctcataaattttggggtgaagaattgtatatatctccaccttctaaggaaataaatgtaaatttagaaaatactttgtactagatgcattcaagtagatatacttaactattctgcaattgttggacatagatattgccgcccagataataatgcaataaatatctttcttggctgtcattagaaatgatgtttaaaaagactatagggtgaccaaccccttttcaacactaaaggttaagagaaacaagaagtgataggtataaaagtatctcctgcccttgcagaaaaaagtctcatgcacagaaagaagaccaaaaggaaatagagtgcaccagaatactaacaatggttgtttttcaaaagtgatattatgtgtatttataaatagttatttctattattttctgttctgtcaaactttctgtaatgagtttataatattttatgataaaagagaaaccaataaacctaaaaaaccccgagaaacttaaaaaatttaagtgcaaaagtttcctttgacaaaaaacatttataagcatgttgtcaaggtattttagagttctttcactatttatggcatttcatccatatgtggactattaagggcagaaatacaatatctttatttgggtcaaaaatctctgtattcaaaaaacagaactataaggcattgcagataggaaaatacgaatatgctctgaaattagtattttggatccactatgaggaaatgccagcctgacatgaaatattgaagagaaggcagaaaaaaaaagctagactatttcattactaatatgacaaaagcagaagcgttactagaccagctttagaacagcccagcttcccctttcacttaattacttaatttcattcattcatcctcacttatttgctcacacaaatattcatttaaatatcatatagtaaggcaaattaacctctctgattggaaatttcctcacaggttaaatggggactattcaggggtactacttaatttgcttagagggtacttctgaaagtaagggataatgaatgtgaagttcctggcacctaacagatactaaaaaaaaattagaacattgttgttgttattattcttcccattaggtgcccagcttagtactaaccacgcttggggaagggtttcacaataattctggtgaggaggaattggtgccacagcgtgttagatgctacttacaattaacagcatagaaaactgtgtgtggtttatccctaaaagtagattgagtatgtctctacaatttttaaattaatttttatcatctgtgctaaatccttagttgaaagatatcttttgttccctgaatcggtggcctgacctgtattttcactagctctgccactgagacaggccatactccttgcctagtgatagctgaaaagcttcttgctggtaagtaagtcaccccttacctttatgtgaggtgatgacatggaccccttaaatctttccagagtccgttggtaggcttcttggtggaaactgctaggtgcaagtttttctgtgagtacctggtaacagtaaccatgtgtctcagtggctaatgcatcttgtggccacttggaatagcaacaagaatctccagatggaaggatgctgccaatgagactttatatagttaaaagaacatttggaagtctggggatacacatgcactttatgtaaatccaaattcaatttagactaacaccatggccttctggcacccaataaggcaaggcaacccagatgcatgttcccatcaggtggtaactcattagctggagtagtccaagctttcagtggttatgatgagggccctgtgagaaaatgcatgcacagtgcctagcatggtcagcagtcagtaatagtgacgattatttctgttgtcagcatccaaatcaccattctcatggctctgtggtaattatctgatggctcaaccaagaaggagcttgcctcattctagccggttgcaggatgaacttagtgcctgggaaactgcttttctggttataaaatcaggtttagggaaaacaggagttgtggcatatggagatatcctgttttttcctcctaacttgatgtgtgggctgttctttttctgtcctagaaatcatagtgttttagaatacctcttcttaatgcccattcccctcttttttgctgggatacacatgagtgctacatacttccactgaatgtatccagatttgatcaaaaacagcaaattgtggtaaagcaaagcaccacggttattcatgagtcacagaactatatgcagttcaccagagctggtagctgtctcagtttgggccctctctgaagcagagcctgaaacaaggacttggatgcaggcagtttattattattattattttattattatttttttgagacagggtctcactctgtcacccagactggagtgcagtggcatgatcttggcccaccataaccccgcctcccagcgttaagtgattttcctgcctcagcctcctgagtagctgggattacaggtgtgtgccaccacgcccggctaatttttgtatttttagtagtgatggggtttcaccatgttggccaggctagtcttgaactcctgacttcaaatgatccacccgcctcaacctccaaagtgctgggattacaggcgtgaaccactgcttccggcccaggcagtttatttgagaggtgattctatgaagcaggagttaaggagtgatgagataaggcgggaaaggaggaaaaactaagataagggcacatgatggagtttgtcacattaagcaagggggccttgattctccccggaccgtggagaagcatgccaaatgcctctcagaagcatccacctgaagggttctccagtcacatgctcttgaggatttccctgagctttactgctctgaaattctgtgtttatgcttgcacatggtgaggtggaattcagagagagccatgaggtaaaacaaaaacaaaaccaacaaattagggtgaggggatcttctagaaaggtggagtaaagaccttcagaaatctgctctttcatacaagcagtgagaactgtccaaatcaactttttcagaattctggaaattacttaaagtcttacagcagtctgggtgcttactcaagaaaaacagctgaatctcagtaagaggagcaagacctgtggcattccaaattgccctaattccatcccactctcacagctcggtcaggccatgcaaatcaacaaccttaaaaccggcagttgtgaaaacacagcctagcagctactgcagggtgcagaacaggctcggagtcccccaaaagcccatccctagagaatttgtcactatttgacctgacagctcagggctcgtctgtttcatttgactcagaggttgttccatgcaaccagccctacccatagggcatttatcaacaataagcaaaaggcagttgtttaacattgcattacctgaggtgccattacaaattcaggctaacaagaggctaagcacaaaatataagaggaacactggtgaattagataactgtatgggttttgaaaagctttgccatattcctacaaatctagaaggccacatgcatgcatagggctgtgtacatgctcaggaaagtactggaagaccctaggctctcacctgtggctgactttaaagctctgtatatgcaggaagtgaaagcaaaggcagaattggaaatggctgctaaaatgtgggccaaggcacggtggctcacgcctgtaatcccagcactttggaaggccaaggccgggggatcacctgaggtcgggagttcgagaccagcctgaccaacatggagaaacccccatctctactaaaaatacaaaattagctgggcatggtggtgggtgcctgcaatcccagctactcgggaggctgaggcaggagaatcgcttgaacctgggaggcagaggttgcagtgggccaagatcacggcactgcactccagcctgggcaacaagagtgaaactccatctcaaaaaaaataaaataaaataagtaaaatgttgaaggagtgacccaacacacacacagatgccacaggcaaagactgggagaatcactggttcaaagagtttaaggaaatctcggtccagttatgagctgaccgctaagctaaccaagctgagactccagtggctgcatagggcaaagaatatggactaaacagaattagtcgaggaaagtcactaaacaaacaacagcaataaaaaaacaacaaagagcaataacagcaaaccctgggaaggaaggggaatctgatttccagaggtgacacataatttacaatatctagttttcagcaaaaaacgataagcctgacagatcaagtagtgacagctctccagggatgggcttttggggaactccgagcctgttctgcaccctgcagtagctgctattttcagctgtgttttcataattctcggtttcaaggttgttggtttacaaggcctcacataagtatggcccacacacaggggaaaaaaagcagtcaatagaaactgcctctgaggaaacccagatgttatacttactatacaaagactccaaattagttatcataaatatgttcaaggatctcaaagaaaccatgtctaaagaattaaaagaaagtataagaatgttggcccattaaatatagaatatcaacaaagagttataaattacaagaaaaaagagaactaaatagaaattcagggcttggaaagttgctatagactgaatgtttatgtcccccgaattcatatgttgaaactgaatctccagtgagatggtatttggaggtggggccttgggaaggtgattagatcatgagggcagagcccacaccagaacttgaccatgctagcaatcttatcttggacttccagcttccagaactgtgagaaataaatttctattatttatttatttatttatttttttgagacggagtcttgctctgtcgcccaggctggagtgcagtggcacaatctcggctccctcccgagtagctgggactacaggtgcctgccaccacgccccactaattttttatatttttagtagagatgaggattcaccatgttagccaggatggtctcgatctcctgaccttgtgatctgcccgccttggcctcccagagtgctgggattacaggcatgagccactgcgcccggcctgttctttataagccacacagtttatagtattttgttacagcaatccaaagagaataagaaaaaggtacaacaactgaaatgaaaaattctctagagggtatcaacagcagctttgcactagaagaagaaagaatctgtgaacttgaaagcaggtcaactgagagtgcctagcttgtggaacagaaagaaaaagaataaagaaaaatgaatggagcctcagagacctgtgtgacaccatcaagcataccacatacaaataatcagaatccaaggacaggagaaagagaaggggatagaaggggataaaatatttgaagaaatcgtggcttaaaagcttccaaactttgatgaaaaacattaatctgcacatccaaaaaggtcaacaaactccaagcaggagaactcaaaaagattgacacttagatacatgcattatagtcaaacttttgaaagacaaagagactattgaaaaaagcaagaaaaacactcatcacatactatggatgctcataacaacgtcattcataactgtcaaaaagtggaaacaaatgtccgttaggggatgaatggataaacaaaatgtggtacgttcatataagagaatattatttggtcacaaaaaggaatgaagttctgatacatgttacaacatggacgaaccttggaaactatgctaagtggaagaattcagtcacagaacaccatgtactgtatggttccagtcatatgaaatgtccggaaaagacaaatctatagagacagaaagtagattagtggttgccaggggtggaggagaaagaaatggaaattgaccattaatgggtattttctgagatgacgaaaatgctctggtattagatagcactgattaatgcacaatattgagaatatactaaaaccactgaattgaacactttaagagtgaactttgtagactgtgaattttatcttgataggctgttatttaaaaaatcaaacaaactacttggtgagtgcttgaggtgggacactgccagctgaagacaaatttgagctcccatgaactgccccaccactgtcatggctgaaatcaggtgaattcagggcaggtgatgtctggcaccaaagagatatgctccaatagcctgtgaataggtaaaataagctgcaggttatgtgctatttctggagttttggggtaaatttgtgccttgctttcctgctcaagcaaatgaaagggaaaatgaatgaatagaagtggtgcaatttatagtgattacattgaatcccctgtaattaaatttaaatacaattctaaattttatattctaaatacaattctaaattataatattttagaaaaatcattcataattttttttatttgtggtacatctcacaacagatagaaagttagcactgtgtggcaagagcctggtagacagcctggcttaagagatcatctatttcagtgggtcccagattttggtaaccacaagagttactttagaagctattagaaatgttgactctggatctctcctattctctaaactctcttctcattcctcggctaaagaatgtgattcactaggtcaggagaggggctgaggtgtcgacactgccaaaaagcagccctggtgattctgatgcaggcagtctatggttccagttgaaaaatattgatattgcccaactcactggtcttagatgagataattgagacacacagaggggaaatgacttgcttgaggccacatgatagaagcagaggtatagagtgggaatttgcattcaggtctcgtcacctgcagtctcatgctctgtccattccaccacagctcttctcacatagttggattagaacagccctgtggtcaccactcaggagtgctcaggagagtggtggacttgtgtcagggagcattcaaaccactatacacttgccaatggctcaggcaacccgaatttctgctgcttttgcatataaaaagcatcttgtgcagagcatcagaatgtgagtgatgccacgtgggagccgaggaaggccagtgaatgtgagaatgtgcgtgtttgaaagtacttggagatttcagagagtggcaacccaaggacccacaaatgactcatttctttttaaaccagagctacatagtgttaagcattcaaacattttcagacatgtggatcactgactttagtgttcagtttcctgctggcacctaataccatgaaattacattgcagagaattctaattcatagtcagaacagttataaatatatttggctacaaaaaacagagacaatgaaaggaatgagacagagtgctatgaacactcttcaaagataaaagattagtcttgaaactatatcataattttatagaatggggagtctaggctgagaaaaccttatatggtggcataagaaaacatggtgcattgcggggactgggagatacagagtttagtgtggctgggtaaggagtgtgtttggtgtggctgtgtgtgtgtgtgtgtgtgtgtctgtgtgtctgtgtgtgtgtatgggaggcaggggaaggggagattagggatagggaggagcatgaaccctgagagacaaggtcagggtgggaggaagatccagatcactaaaggcctcaaatgctattttatggagcttggacctcatctaattgacattggggaaccgctagaggatttcaagccatgcaggtggaattgcagtttagaaggatcactcagtttggagtatggagaaaagctagaaaagggatgcaggaacagaggccactaaaaaatgataagggcctgaaccaaggtcttggttagaagttcttcccaagcttgaggacaaccagtttcagttgccaccactgggcaggtccccagaagacacaatacttgggaccattgtccccactgcctctttacttcttaggagacatctgtgatcagatttgagaatcaaatttcagagaggcaagcttggacgatgggtgtaagtgttgtaagaaaaattggtaaggagacgagaagaaaagatgagaaaaaggagcagggagaggaaaagagacaagagaaaagatatatgaatatctagaacttagaagaatcattaagaggtcattcttagtttgcaaaatgtttcgtaacgattgctttaagaaaaacacccagaatttttaagctctatatcttctctagtgattaatttctaaattcattttgaagaggtcattattaaattaattatctcatagcgatctcatgtataaatatcatgccaaagaggtaaaaatttatcgaggctcacacaggaagctgatcaacattctgtggtttgacaatctgcattctgagcaggagccagggtttaactttaccacatctcagaggaattcagattttctgagaaagggctgaaaaatttgcactccctggggtggcagaggaggctagggctagaagccaggttaccaaatccctgtgtggaacacgtgggcagatgtgaaaagtgggaggaatgttcagaccacatcgtctcctagtgaaagtaccaatgcaagcttgcaaccatagcaacacaatagccctattaaaacacacacacaaaatctgtcaatgaattaaaaaactccactttttgctagtaagtaaagcttggcgtttatttttgtttgctctttatccatttgattagaaacccgctgttaaaagactccaattccttgataaccctttctagtacagaggcaaacattttaggaatataatttgtacttgaagaggataattctcttgtgactctagaagggagaaacatgaagaaaatacgaactaataagaaagaccaggtgtggcaactcatccctgtaatctcagcacattgggaagctgaggcaggaggatcacttgaacccaggagtttgaaaccagactgggcaacatagtgataccccatctcaaaaaagaaaaaaaaagaaagaaggagatggccttaaggtttcttgtcttggcaccaaaatgaaatcagtgatgagtgggtggaggactggagttactatgggcagtgcgtgggggagataagaagaaattgccctaaagatatgtcaggtctctttctaaagagtaggacttggaccaaggagaaggaagtgagtcatgcaagcacagggtcagatcctgtcttcattaaaaatgtgatattttgataatgattttcttgcattcattttaattctttaaaatattacacgaaaatgttatttgattaattttttagtgctccttaaaatttgtacctgatacatcaactcatgctagttcctgccctgctaaagggaaacattaataaatgagaaaaaatatttatagttcatattaaatattgtttgcattccgaactctacttggaaagcaaagccatgttctctaggtccacaggtcccaagctctacctcccgtggtttcccaaggccagggtgtgtggaattgaacatttcacaatctgggggagacaacacaactttatggttttttcctctggttgctttgaagattttctctttattttaagcaatttgataacattatgccttcatgaaattttcttcttgtttcctaagcttggtgttggttgagcttcaaatctgtgagtttatatctttagacaaatttacatctaaaaaaattaatttaaaaattttttctgtcttcacattttccaacaggaaaataatatataattggactgcaatactccaattatatgtgtattggactgcttaaaggtgtctgatgttctcttcatttttcagtgtgttttctccaggagttttattatgcatggttcctatggctatgccgtcaagttcactaatattattttatttggtgttgaatccactgtttatcctacccagtgtatttttttcaggtgttgtagttttcatttccagaagttctatttgggtcatttaaatagatctcatgtctctttttaatgtgcttaatctttcctccaccttcttgaacatatggaatatagttacaataactacaatgacatgatctcagctcactgcacccttgacctcctgggctcaagagatcctcccaccttagcatcctgagtagctgggactataggaacatgccaccacacctggctaatttttgtatttcttgtagagctggggtttcaccatgttgcccaggctggtctggaatgcctgagcttaagctatctgcccaccttggtctcccaaagtgctaggattataggtgtgagccactgagcctgaccataactacatgtcttaatgtttttctctactaattctaacatctttatcatttctgggtctgtttctactgatcaatttttcttttcattatgagttatattttcctgtttctttgcatacccagtaatttggattggatgccagatattgtaaattttaccttgttgggtattggttttttttatagtcccataaatatttttaatgtttgttctgagatacatgtgcattacttgaaaacaatttgaagtttgcttttaagctttgtgaggtgggatgagagctgcctttggtataaggctgatttttctcactactgattccagactcccagctccatcttctcaactaaatgagacctcctctctgcatggtatcttggaaattttccaggctgtgagctggaacaatcatagagctcaccttatttgctttcccgctcttagagatcactgtcctgtgctgtctgatgttcagtgtctaaaaactatactttctgatattttgcccatttactttttagcatttttcaagacaggatcaattaggtctttggtattcctctttgcctgaagtgaaagtcttgaacattatggcttctgactgtggttgatgagtaatatttttagagaacaaaataaagtataccttgaatgaccaattaaagctttctgaatggtttaagacactttaataaaatttacatcacctataagtgtcaaaacaattataaatttatactcatagttttcatataaccccttagtgagtaggtgtcaaagtttcatttctcattaatgaggtaatcagaagaatgataaagccagtgaggaaagtgacacaaagagaaggcaaatggccaggcacagtggctcatgcctgtaatcccatcactttgggaggccgaagcaggtggatcacttgagcccaggagtttgaggccagcctgggcaacatggtgaaaccctatctctactacaagtacaaaaattagccaggcgtggtggcacacacctgtaagctcagctactcaggagactgaggcatgagaatcgcttgaacctgggaggtggaggttgcagtaagccgagatggcaccattggactccagcctggatgacagagcaagactctgtctcaaaaaaaaaaaaggaagggggggacaggcaaatgacgtattagaaggaggaagagaggcagagagagagaaagggagagagatggggagagagagaatggaaaaatatgctggaataaaattgctaaattacatacaaactggttaatgtcccacagggcaaaaaatcataacctttggggttatcatctaagctgaacagaaataatttttatctctatgataaaaaactcatttgcatcatatttgttttccacaagttacatcaaatcctttacaggcttaaaaatgtctagatgtttaatagtagtaatggtaaaagttactttccactagagggtcagatgatccttggatgggctaaaagcaatgttttaataagggattggatggacacaagtcatctttttgcgttatttccaagttttgggaaaaaaggttttggacaaatttttttttttttttttttttttttttatcacaagaattaactgtaagtcgatgttatctgccatgacatagctggccactctgggcctacatttgctcatttaatgaaaagacaaaactagactagtggtttttaattgtgattatatgttagaatcactcaggggagcttttcgaaaatacaaaagaaagggtcttttaccagaccaactaaatcagacactttgagggggacgtctgggcatcaccaagtttttcaaaagtcccctattaccctaatgtgcagccagggttgaaaaccactggtctagactgagttgctcagacccctttcaataacaatgcactgtgattctatagcttgaagcacaggcaaatcatttttgcgctgaagaaagttgacataaatacaagctctgctgaccgcagtgcattcccagtgacttggaaatgattcagggctgccagcattcattccatggtgtggaagcagtgggaagagccaggggtgggagcgctgaatgaccggcctttgtgttccaattagatacagtcagcttgagttgttagagagagataggaatgtctgcagcccattcttttaaaaaaaaaaaaaaagatatatcaaaattcattttgtgcccctggctctctgttgctaacctcattcccacttccggagcaggtgctctttcatctttcacacagttattggagatggcatttctgatttaagactgtgcattagtaaattaaggccatgaccagtaacatgcacaaaaatagcgcaacaagtataagcctttaaaataatgttaaataatgaaattctattccttcatgcttgttatcactgaaatccattttttgtagcttttaaaaaaattacaaatcattaaaagcaagggcttttgaaatgcttcaccctacaactatgcttataagaaacacataggatatgttactaactgagcaagccggaaattaaaagaaaaattgtttaacttgataactttttttaaaaaatcataaataatgttgaattttttcaagtggcttttgggcatctttcttgattattgttcaacttctttcctttgatctgttaacatagtgaatgttaatagatatctaaatattaagctatcttttgacttctgggatcaatactatttgttaatgatagggtattctttcaatattctatttgatttcatttatttcccttctgatacttttgaggataatcttcttttgtatatagcaagttgggtagggacggtgttagtttcataatcatttgatagattagaaaactgaaacacagagatagtaaatgacttattatctaagaacaaatggcaaacaagtatttgatttctggcccagggatttttggtctgttctccaccaggaaattagtgtttcatcaagcaaatatgccatccaccaagtatttcagataacctcacaatatttcacataacctaagagtagtgtcttctagtttagctacatcattaatgccatttaaaatcctaattcctaatgctctcctttttttattctccacagtgacagttgtcataactatatctaacgattgtgggacttggagaaaaatgcagagtggaagcaggaggaggtgagaataaggaggccagaaggatggctgagtcattagctgagctctccaacctcctcctgtactattctcccctttactcactaactctagccacactggccttccttttgttctccgaactttccaagtccattcacggcttagggcctttgcctttgctgtgccttctgtttaaaatggtctgccctagacttatgcatggctggctctttcctttagtcaggcctcagcttacatactacctcctcagagaggccttccctgaccttccatctaattagcagatacccactatataggttgcatatccataattcgaaagtcccaaatccaaaaagttccaaaatctggaactttttgagtgctgacatgatgctcaaaggaaatgctcattggagcattttggatgtctgatttttggattagggatgctctgcatgggtaagtataatgcgaatatccccaaatctgaaaaaaaatattgaattctgaagtaattctggtctcaggcattttggatacaggatacctatcctgtattagcttgctagggctgcctaacaaagtaccacagactgagtgacttaaacaacagaaattgattatttcacagttctggaggctggaagtctgagatcaaggtgtcagcaggtttggttccttccaatggctatgagggagactctgtcccagcgtctctccctacagcttgttacatcatcttttctttatgagtgtctctgggtccaaataagaagtttactgggaggtgatcctggcagaggaggggaggggtgaggcagaggatagaaagaagccaacaaagggtgtgcactgtggacaactggagcttaatcctgctgaggccctctgggagccagtgtggaatacaccccagagtcatctcccccaacgggcacccgtgttcaccagtgtacccaattcccatcagccatggttggtctgctctggggtgctcatgggtggagagctgctcatgactctggtggctagagaaaggccacagacaaagagttggtgggctgctggaaatccagtccaccagtgcccactgaaagataaggcctgaaggagtaaagacagggcagtgactgtgtcagctactgattgacacagtggctgatgggctacagtagattgatgggtgtgtggctggggcagagaggcagtgaagctatgaggaaaaattttccctactttctcccctaggaagtagaggaaaagttctttttttttttgtgacacagagtctccctctgttgcccaggctgtagtgcagtggcgcgatctctgctcaccgaaacctccgcatcctggattcaagcaattctcctgcctcagcctcctgagtagctgggattacaggcatgcaccaccatgcccggctaatttttttgtgtgtttttagtagagacagggtttcaccatattggccaggctggtctggaacttctgacctagtgatctggccgcctcggcctcccaaagtgctgggattacaggcatgagccactgaacccggccaaggaaaagttcttgatgaacatcctcttgaagactattttgaataggtaatactccacattgtatacaattcgagtataaaagtacacagtgaaaagtgtaagtctccttttctcaccacccacgtctgtcttctgctgcactttcttgtatatcctttcagagacagtacaatggtgttgagtgtgcgtgtgtgtgtgtacatattgtacaggtaggtattacatatgtatacatattacacatacagttaatatatatgtgtatgtatgtgtgtacacatacatatttatgtttttacataaattgccccacacaagcagtagcatataatatattgtgctccttttacaaatgtatcttggggaactttttatattactgcatgtagctttgcctcagtttttaaaatggctgcatagcacccaatttaatggatgcacaacaatttaacagatcttttaaattgtttaaaaatatttttcttctgaactaagtatttttgtgcatgtgttattgagagcattacaggaatctgtagggtaagtgcgtaggaatagaattgctgggttgaatgacacatgcatctgaaatattgatagatagtgcagaatttcctggacctaacatacattcctatgggattgaccattaggaggccaaagaacggaagtggaggggtagggagtagaagaggagggtggggcagtgaggcctggaatagcagacatcaagattctggtggcacagttcctgctgaggacaaggtccagggtgtgcccgcaccaggaagtgggtggcatggggcacagtgcaggcgaaggtcagtgaagcagaggaagttaaagagctgtgagttggtgggtgactcaccccggtgatgtcagctagtttatgctggtgagctcttcatcagaactggagaaatgtggttagagaaaccttcagcttctctttaaatctagcagggaagagccagatgcctcccagtccattgtctaccctgaggagcagagaaaaaactcttcacactttcactctctgaggagaaagcacgtcaatcaaaatggctgcctcaggggacccaccatgatgtctccattttttatgatggcatctgtggcaccgggacaggcagggctgtttctgcagatcctccagcttcgaatgaattatgcctgtggacaactcatttcacatctcgggtcctctaagtgtttctgacattgtcagaacaaccctggtctggggcacctctttcttgataataaaaccaatagcaacaatgacagcagtagcggttaacatgctgaataatcagttaggggttgtgttcagccgcaggtagcagaaacctgaaaaacactggtttaaatcagagacgagttctcatttccctcaggtaccatgaagttcagggataagcatcccatgaaaggtatagcagtttcgcactgccttttgtgtcaggagcctctgtttctgctctgcctctctagtgttgacttccgtcctcctagacggtggctggagtcctagccattgtgcctgtttcatgctggaagaaggaggtaggggtcaaaggcgaaagggagcatgacggatgaattgacatctcccgctcctaccttttaatgaactgtcccagaaaccccactcaagcactggaagcttacatctcgctggacagcttatagtcatgtggccacccctatctgcagggagcctgggaaacagatttttagccgtgctcattgctgtcgccaccaaatcaaggttctgttaataaagtaaaagaggagaacagatattggctaggtaactggcagggtctcccagatgtcccaggcacttcacattttttaaaagttgtattttattttttactgtggtaaaatatacataacatagaatttaccattgtaaccatttttaaatgtacagttcattggcattacatatatttacaatgttgtgcaaccatcaccattatccacatctcaaatagtacactgtacctgttaaacagtaactccttcctcactgtcctggctctcagacactgggaacttctctactttctgtctctatgaagttagtacctcatgaaagtgaactcatacagtatttgtccttttgcgtctggcttatcttgcttagcatagtatttccaaggttcatccaggttgaagcatgtatcagagcttcattccttttaatggctggattacattctattttatagatatatcacattttgtctatctattcacctgtcggtagacattcgggttatttccagcttttggctcttgtggatacgctgccaggaatgttggtgtaccagtatctgtttgagcccatgctttcaagtcttttgtgtatatacctagaagtggaattactagatcttgtggtaattctgtgtttaaccttttgaggagctgccagttgccctttacattttgtattttatgttgtttttacagacttgtagttgttgaagccaacgttggaactgatctagaggggctgcctcctctggatccaggtgactctctagctggttgatgctgcccactgtatctattcagggatttctgttcaatatatgctgaagtgagctggatggaattatccctattttagaaatgagaaacaaaaataggaggctaagccagcgatataccccactctacccttggtaaccagagctccactaatcaaacttctggctctgcccttaggaaggctcaccaagtgcttgtgggcagtcttattgggcctgtagtcgatttctttgatcagtctggacttgtaaagaccacaccatgaggttccagacagtagctatttccattcccatgctcaccctcaaaccaacctgtcacaaattcaacagggagagagaagatgaactttgttcattttgggcccctgtgatagttcaaagtgagacttatcatagtggttaagaacatggcagacagagccaggtggcttgagctcaaatcccaactctactgttttctgtgtgaccttcattgaaattattaaacttctctgtgctcagcttcctcatctgtaaattggggattaataacaatgcttttgcttagttcatatggttgttgtgaggattacctgaattaacatgtagaagcaagtactttaggaaggtacctgcaccctggaagtgctctgtaatgggggggtcaaggtagtagtgttgacattttgattatacctaagaaatggaaattctctctctttctctctctcttttttttcttctttgagacagagtctcactctgtcacccagactagagtgtagtggcacaatctcagctcactgcaacttccgcctcttgggttcaatcgattctcctgcctcagcctccccagtagctgggactacaggcgcgtgccactacacctgaataaaattatcttaacaataatagttaatagcaaagtgaccatggatcaccacggaaactttggaaattagaaaaaaagaaaaaaaaaggaaccaatttaggaggacacacatgaatacatggggaagcacagctggatgggttgaaaattcattggaccattttggcccaatgtcacaggctagaaaatgctagccacttggcatctaaatttgtttcacttctgaattgagtgcatggcaccattgtgaggattcattaaagcaaagatcaggcttgataaactcttatcactaaacaaatataatcaagacttagagctataaactgaagtaaaccctgcagctctgatagtcactgcccagactgatttggtgtttgtggccaggtcttggcactaaaactgagggagactgtggaaaacatggagggagttcagaggccaaggacagacatgaggaagagttggaattcttatttatttatttagagatagggtctcgctttgtggcccagactggagtgcaatagtgtgatcatagctcactgcagcttcaacctcttgggctcaaacaagcctcctgccttagcctcctgagtagctgggaccacaggtgtgtgccaccatgcccagctaatttttttatttttattttttgtagagatggggtcttactacgttgaccaggctggacttgaactcttgctctcaagtgaattgcttgccttggactcccaaagtactgggatgacaggcataagccacggtgcctacctagttgggattctaatgtagtgcatgtgtaccagatgtcgctcactgaagatgggactgggatgattgcaccaggatgtgaggaattgggctaattttcatatagcatggaatttaaaatgccagaaagtgtttttgaaaatggtgaaatctgagtcctcctctatgattatccaactgtaatagggaagtggaagctacactaccagtacggcggttgttgcaaagatggatggacgcgaagctcccgccgtgagctgtttagacctgattctgtgaggtctggaactaggtatttacttagcagtcaccttctgccatctatgggtttatatgtttcattgcagttacaggggagtaggctgtgataccatcagacacaaagctgatgtttttgttaaactagtcacacctcctcctttttgtccacaaaagccatttttcattttttcagtatgtttgttttcgtttttggtagataaaacactttttgtgatgataaataattatttctttggaacaaggggggaaatttgtattgagacatgcatgaggaaggacctgggtgcctggattccatttgttaaagtgtttttaatagccaggaaattcttccctctgcattaaaagacgaagccatcattttgaaatatcctgtgaggcttgcattttccctcaggttacaggaaaaggggaccaggaattgcagtgatttctgctttctattgttctaatgctttatttttagcatcaactagggtagggaaagccactgattgtgacaaaggaaaccgggaagtgctgtgaagggcaggacagataggtgggcagtagacataggaaatcagggaggactttttagagggaatgaggtgggctctgggtttgaaaagaaatgaaagtcacaggaagaggggatacgctgctggaaaggaccacctaggtgctccttatgttctgtgtctgcagttcaagagagtttcatgcagaaagaggacacagtttcccacaaggctgcctcatagctagcttctttcctttgaatctccatgtctatttcacctgcctgtttccatgctaagctccctctccttctctctggttcaaccacacgagtctctttcggtttctggaaagcactgtggtctccatcactaggggcatttgcatctattgcctgctccgctagaaactctctgtgccctgggaactcctctccattccttatatctcagcttaaaactcacttcctcaaagaggcgttgcccattcccttggattggctctacgtgccatgcatcatattcatacttttcaggagctcagattccgtgtccaacatcagccttctttctattgcaagtacggcactgtgcctgcatcccccttatccaggaagaggcacccattggaggagtcaagaggggaaaacagtaacaaaactgtacctattccattattaagttttctgtggaggtttattttagaagctaggctaaaggtgaccaaatgtgccaactcaccaactcatggtagagttgagggatagaatactgtgggtgtcattttcccagtacagcaatggacttggcccctgttttctgattcctccctggtcctgtggggacaggaggggcagcactctgggatgcaagctctgtctttcctcctacccccaagggtggagtaggatggtgattgtgcagagaatcatatggctggagcatgacaagaccactaaactcaggaaaaagggaaggagacttttctccttccattacttgggataagctatttcccacagtgcaaggacgaattggaaagattaattatggtcgcagtacaacccttcaacttcttttttttttttaattttgaagaagagaaatagaaaaagtaatccaagaggctaattgggctgcagtatttggggagaattagagaagatgagtcctggagagatgggtaaggatcagggctgatacagaatgcacaaagcggggtctggaaggagtcctgggtttcagcttctgcgatgtgctaaagtggggtagcacagctgtcaggggacacctagctcagctgttggtgtcaagatggtcctggaaaaccactccagagttttccagagaactgttgcctcacatggcccttggccatgtgagtgtcttgtcagcacgatttgaggttcatgagagaattgcttttggttgccagcaagaagcacctggttctgcaaagctaggacaaaaataggaactggcatagaggcaagcctggtcatttgactcctgattgaccgaagagatttgagaatgacccaggggaggggaggaagctaggtctttatggctgtaccacggtaatagtaggtttcctgggggatgaggtcaaggaataagaggggtcactgacacccctgtaagtttgagaaaaccttcataagctcaggggagttgctcatgctatacatacacagttggctaaaatctttgaatccagtttggctagcaccatgatcatcagtttgacaggagaaaatcccaagcatttgtatttaggaatatatactgagtttttactgatcatatatttcatggctcccttgaggaaaacctttcatgataagatagcaggtaatattctaaagccctcccttactagtaactcaagatttgaacccttgatgtcttctcttaggagctccctttgggagcctgcgcaagtcagtggagaagagcgctgacctggaaggagggagtctgggttccattctcaaacttaccactcagtagctatatccatgagcaagccacttcacccatctggaacccaagttcctcactattagatgaagcagctaatgttcctcccacctctaatgttctataattctctgatccagtaactggaagccgtggtgcagcttggtgctggagaacaaatagaggcattcctcctgttatgaagtgagttgtgtcctccccatccctcaaatcagtatgttgaaaccctaagccccagcgtgtctctatttggagacagggccttcagagaggtaattaaggttaaatgaggttctaagtgtggaaccctaatccaataggactcatgtccttgtaagaagagaaagactttgggaggccgagatgggcggataacctgaggtcaggaatttgagaccagccttcaacatggtgaaaccctgtctctactaaaaatacaaaaattagccgggtgtggtggtggatgcctgtaatcccagctactcaggaggctgaggcaagagaattgcttgaacccgggaggtgaggttgcagtgagccaaatcgcgccattgcactacagcctgggtgacaagagtgaaacttcgtctcaaaaaaaatttaaagaaagaagacaggtacacacaggaaagagcatgggaagacacagtgagaaggtggccatctgcaaaccaaggagaaacccctcactagacagcaccccagtggcaagttcaccttggatttctagtctccataactgtgagaagatacatttctgttgtttaagccagtcagcctgtgacattctgttaggcagcctgaggaaactaacatacctcctcatccctcaaacactggactatgacttattggtctgtggcctttgggggtgtttgcatttaactttctccattggcaaaggcatagcaaagtaaattggctcctggaaaagcaggcactctactgctttggaatttatggagtggagtcatggatgtttctgaggtgttttctctaactctaaccaattttctaacatgagcttggtgtccaacagttcaattcaattccgagactgtctacctgatgttactatcagctcccaaagttaaagggctcggtcccacaagactgctgccatctcagataccagttgcaaatcccaggtcatgcgtacttctgactgactggctataaattgggggttcccatgaccttcctcctcaagtttggtaatttgctggaatggcttacaaaactcaggaaaacattttatttatgtttagttgattgttataaaagatacaattcaggaacagccaaatggaagagatgcatagggcaaggggtagggtatatgtggagtggagtgttcatgccctcccacggtgctccatcctcatggcacctcgatgtggtcacccgcccagaaagctctccaaaccccgtggctcaatagtttttataacccaatctctagcccccccaccctttctccagatcatgtccaatcttgaggtggtcctcttgtaccagtgtggaggagcctgtggggttactttctgagcaaaaactgggcttggaaaccttaaaaatacatcgttattgactaaataagttttcggagagttctgccagaatatcttggttgcggggccctgtgtagacgtgggcagctgtggggcaagtggatggaggcgactgctttccagaagggaaggtctacactgtcaccccaaaaccccagatcacaggattttgtacagcattgagcttctgtgtctcttccttgggagttgcctatctgggacttggcagtgcttggacaggaagtggtctcatgctaataactggtacaaggacccgtggaggaggagcaagcaagctggacaccaaacatagggggtgcctgcggggagtctgagggacctgcaggcccagagtaacagcaaacatgaggatcagaggacttgaactggactctgagcttcctgtgaggccgcagcagagctcgtccgggatttcttggtggaacaagatattaacattacacaatggggtggagaaggcggggtcaaagacagatgtcagtgcctgcaaacacactgtgcctggccctgctgagagggtcacgtgtgtgccaggctggttccaggctccgccatccacactcccagggtctgtggtgaaatcgaatttattctcattctcatcattagaagtatgtctaatttagaaagaagccacattgaactctgactcctgttgtcccctcaaagctgtgtgttaagcaaatcggcataaaggattttcttctcttttacctggcactgggacatctacatcagagttcataatgtcactccaaaggcacttgctgagaaatcttgaaggtgaagaatttttctgaattttccaagaaacagattttttaaagaataggcacatcttatcttctgtttttgaaagtttgtaatctataggccagatacaaattttctgtatctagaatacttgatttttttagattgggaatttacaagaatgcatgggtatattttatctatgtaaataaactctaggctgggcacagtggctcacgcctgtaatctcagcactttaagaggcagaggggtgcggatcacctgaggttaggagttcaagacctgcctggccagcatgatgaaatcctgtctccactaaaatacaaaaattggctgggcatgatgatgcatgcctgcaatcccagctactcgagaggctgaggcaggagaattgcttgaacctgggagatggaggctgcagtgagccaagatggtacccctgcactccagcctgggtgacagagtgagactctgtctcaaaaaaaaaaaaaaattcaaaaaagaaaataaacccttttcatatactttggaagcattttttaagaacaaaattacattgctaataaaaatatttattgtgagaagtttcaaaagaatgtaacacttggaattaattgaagtactgtttgagcatgtactatgacatttttataaatgtagagatactgaggcctgcatctaattcatatctgaatccttaaaaaaaatcctgcttgctactctgtaggtgatacattcttgctaaaattctgttgaattaatttctcaaaagtaaatagtcggagccacttatttgaatacctctagagttgtgttagcagaaataggaactgtattcaaaacagactgagagacagacccaagggagtacagattttcaatttgtggtttcagatattcaccattcatgggcacctattgcctactctctcaacacttccatgttcagtatagtgcagttagttgcttcaatctcttttcttttcttttttttttttgagacagagtcatactctgtcacccaggctggagtgcagtggcgtgatctcagctcactgtaagctctatctcctgggttcacgccattctcctgcctcagcctcccgagtagctgggactacaggcacccgccaccacgcctggctaattttttgtatttttagtagagacggggtttcaccgtgttagccaggatggtctcgatctcctgacctcgtgatccacctgccttggcctcccaaagtgctgggattacaggcgcgagccacggtgccaggcccgatctcttttcttttacactacactcagcatgtagctgtgtgtacccattggcattggctaattgcccactgtgctccagctggcttgtctgggggctgggatgttaaaagctccttatatgtgctcatctctcttgtggtgggtctgatcagaagaatgtgtcaccactaactctatacttcccagagaccggaactcccagctccagctttatgaatgtaccccaccccccaccacaccattaggctctcggaatctgtcagaattctttttttttttttttttgagacagggtcttgctctgtcactagtctgaagtgcagtggtgcagtcatggctcactgcagccttgaactcataggttcaagcaatcctcctgccttagcctcctgagcagctgggactataggcacacaccaccacgaccagctaatttttaaattatttgtaaaggctaagtctcgctacgttgcccaggctggtcttgaactcctggcctcaagcaatcctcccatcttggcctcctagagtgctgcgattataggtgttgtcagaattcttagttgttggcaagaagactccagctgatttaaactcatttactgggttctaggagagttggaaaaccaggcttggagctacagtagcaggacagcatacccaaaatcatgccacggggtgctctggtgaagatgtcattctcactggcctgtccagatgctgtattctgttgctatcacagtagaatgtctgctccaggtgcaggctggggacagcaccgcagccactgctgccgtggaaaagcaatcttgctgccactgccgccacctctagaaagggtctgagtcgctgtttctttgtgtcactagcatctgattcagactccagagtgggtgcttctgattggtggatcctggatcctgtgcccataaccacctgcaaaggatgctgagaaagtagtaccacatctcagtttttatactggaaagggggctgtgcctcccatgaaaactcataagaaaggcagcgctccaaatagaggcaggagactcaaatggtaggcagctgaaaggaagagcaactgtccatgatatggactaaactataccaactcccctgctcccagaaaggacaaaagcctcggtgtacacagattattaaaatcccagccaaaccaaaagaaaaaccgacaatggtaaccgtgatagcaaagagacactttattcctttattgcctgtttttgaaaatcctcagtactgtgagaactgcttcatatgtaattgttcaagttttgctagactaggagtttcagcttcatccaaatccctttaagggatattagctctgcactcatcctccctgtccccgtcccaagcctatgttactggtatgctatggtattggattgggatggattacttgccatgaatattttccattgtttctcattaatgtattaattaattaagtaaaatattattttccatgagacacaatggaaaaatggaaaacattcatggaaaaaaacccatttcaatcgaataccatagcgactatgtgtctggaaacatccaaaccggagagctttagtttttaaaacttccgtggagataattaggttttcctcaacccaatttagccaacatctccttggattttatttaaaaacctgaagtagagccaaatgagccacttctgcttagatgaaaaaaggtgtcatctctcactagatttgtactgtgtcactttgtcacccaaggtttccaattcactcttacatagagatgcagtcccagagtacagggcatgtggcatattggtgagaaaaagagagaggatgtggcagggagagtgagaagccagggaatgacgcttcccgaatggtgttgtacaagccattttaccctccagagagcacccctcagcctaaaccctggtgatgtgggtctagtttttccaggtggtagttcaacatagtccaacatcattgcaccagatgaatttgggatcattctagtaagatttacaccttcccattgacaatagcgcatcttggtcaaggaagcgtagggagtagatatgtgaaatagaaaaatattactcatcttgtatacttaactcacagcattaatgaattagttcatttggtaaccatttaccaagatcctattatgtactaagccatgcactaagtgctttgcatgtgttaccccatttaataatccctctaacaatcttatcctgtgaagcggatctatttccctcctgcccccaacgtttgagagataaaaagatgaaagctcagagagcttaagaggcagaattaggactgaatccacatcactttgactgcaaagtctgtgattctggccactgtttctcgtgatttttagtggcttggctgttgagatggctggtggacagtttctatcctcagtgatggttggacatcagaaaagaaaagagatgttagcatatagtgtgatccatcctatagtagtaatatatacaggagtctggcctgaggtctggatgagagggtggttcaggaagcttctcgtaggagggaaaacttgagttaagtgaagagagtgaccaagatgtttccacaggaagagcatgtgtacacttctggaggtgtgagaatttggtggcatggctggtgtgtaggatgagtgtgtgtagaggagagagagtgaggggggcggggagactaaaacaagcctggaaagatacgcaggggcacagtggatgaagaaaacggtgcagatttgagagctacttggggagtagattcaccataatttggtgattagatgtagggaatgagggatgcatttattctttattttatttatgatagttaatgaatgcctgctttaaaccaggcactatagtaagtgctggaaataaaggggacaaaagagctggcatccctgctcatgggttgtacagtgtacaaagaggaaagaatcaaagataaccccagatttctagtttagatgatagagacacaaaaacttagaaaagcactaggttgatttgggaagaggctcaggcatttctgtgggacatcatacaagatggccaagaggtagtgggatatacagacgtggagctaggagagaatctaagctggtgatatagattcgggtgccatccacatggatgtggaagtaaaaaccatgcatgtgggtgtggggtgtgatcgctcaggaaatgtgtagcagggtgaagacaatggaactggggaactccagcctttagaggcagagaaactgtgaaggagtggttacagggctaggagagaaccatgagagagccatgtcatgaaagcaaagtgttatggcctgcctcccccacctcccaaattcatgtgttgaagccttaatttccaatctgactgtatatggagttaaggaactttaagaaggcaattaaagttaaatgaagttacaagggtaggtccctaatctgataggactggtgtccttataagaaaaggaagagataccaggtctctctctctctctgtctctgagagaaaagtccaagtgaggacatagcaaagaggcaccatctgcaagccaggaatagaggcctcaccagaaatcatccttgccaacatcttgatcttgaacttccagcctccagagctgtgagaaaataaatttctgtttttaagccacccagtctgtgatgtcttgttatggcagcctgagcagacaaatacaccaagatgagagggtttcaaggactgtttaaacaaaggcaaatactcagcaaagacaagggtaggcatttgtcttctgaatttgacaatcctgtaaccttagcaagagcaaggaagtgcgaaggctagaagccaaacttcagcgagtttcagggttggatgagcaggagggattgcaggtttcacaagcaaacatggcctctaggttggagtttggcatctcctaccatctatgtctgtcattccagtaaacccttttgtgcagactcccccagggtccagcaatgtatgtggcatatagcaggttctcaataatgcctgcagaatggcctcgctctgctaagtacaggcttcagtgtagagttcgatcaacattacttgcctagtgaagcagccttatatagtaatataaacaactttcatttagtgctttttaggtgcccagcattgggctaaactctttacatctatcttatcatgtaattttcattatgaattaggtactattattgttatgctcatttttcttatggaaaaactgagatagaggttcaaatacagacaatctgactccagagctcagtctcctaaccggtatgctctatggcttctgtacccccatcatccctatccaggtgcagatacctggatctgccctgtgagacttttggggagctgacttgagtttctgggcctcagtatcccaacttgcaaaatgtggtatttggagtagatgagtttctcgagtgctttatggctctaccattccatgatctgatggtttggactcaattacactccgtttatgtgacctggcactaactcatacagaaaagtcaaccaaaagttgccactcttgatttatgcaggcagtgaacttggggaaccctaaccagcagttggaggagaatggaatccctgacaatgtacgaagggacactgggaagcttgagttccacatcagtatctccaaccacccccatctaagtaagatggaggtggggttgggggaagcccctacttctgcctcctgtatggcttctgctaattggctaggatatgaggagagttctggttgaaggttggccaagtaagtttattgaggacaatcaatgaactatagttggccaccaccactgctgttgaagggtttaacgaaggctgcttctgagtatgcagggccctgggcaagattattttgtgggcctctctatataaaaataatttgattaaaaatgatgacaagttgtatcacaaaaattcatcgacccatgtaaggcccatatgatgtgtcaatgaaagtttagaacaatgtgtagaaaaatggtacttttgaatttactttttgtctaatcggtgcacattaagatttctgtttgggtctgggaaccatttctttgtaatctttatcatcaaatatgctgttcctggctaagttagcatcttccaccatgagcaaaaggtagcgatgctgttcttactcacaaccctaaagctcttcagaacctgtttgtattaaagcaatatagatcttccagcctctgtggttccctaattttatttatttaatgctgatacagcattcttcatgatacagcatcatccatcaggctgcctgtgagtattggaccatctccaaagttgttattgtgcttcattgaagatgaccacaaatgcaagtcttactcagagtatgtagaaatgtgtgaatgataatctgttttctggtcatgttcagaattttatagcataatgtggaatagctcatcttccaaccatgtcttcttttgaactttttaggtagtaatcactgtattcccagaatgtgacctccttcaataatgattgcatccctgccttccatacactgccataagaggcaaggagaggtgagggtctcatgggaagaatagaagagaggtctcattcacataagggatgtgtggcccatttcaggtacaacctaacactgtccctggagagcatgacatcaccacatcaattgaaagcaagtgagaacatcatttggaagcgcctgttggtggaggggacactagcaatgggggaggggttcgacaaggttgggtacctgctttcattcctgcctccctgagtgttgtaaccagaggtggcactgaggtcagaacacagtcaggttagagcccatgcatgggcttactcatgtggctcaagccctaaggtcatggtggactcttagtgttctattgctgccataacaaattaccatacagtgagcagcttaaaacaacatccatgatatggtttggctgtgtccctactcaaatctcatcttgaattgtagctcccacaattcccaggtgttgtgggaggtaattgaatcatgggggcaggtctttcccgtgctattcttgtgatagtgaataagtctcatgagatctgatggttttataaaggagagtttccctgcacaagttcttttctcttgtctgccaccatgtgagacatgcctttcaccttccgccatgattgcgaggcctccccagccatgtggaactgtgagtccattaaactgctttcttttgtaaattgaccagtctcagttatgtctttattagcagcatgaaaatggactaatacaatctattttattttctcacagtcacgtaggtcagaagtccagacacacatggcttggctgtttcttttctctcatccattttattttttactttattactattttttgagacagggtcttgttctgtcacccaggctggagtgcagtggtacaatctcagctcactgcagcctcaacctcccgggctgaagtgatcctcctgcttcagtctcccaagtgactaggactatagatgtttgccaccatgcccagctaattaaattatttttatttttattttttattttttgtagagacagagtctcatcatgttgcccaggctggccatccattttattatctcacagtcttgtagcttgcaagtccaggcacacatgacttggctggttctctgccccaggtttcataaggcaaaatctaggtgtgggctgggctgtgttcctttcttgagattctggggatgaatctgctttgaagatcattccagttgttggcagaattcagctccatgcagttggagaaatgaagttccaatgtccttgatggctgtctgccttggatccccctttctccattttcaaagccagtggcaatggatctcataccttgaatctctctgactttcccttctgcctcatttctcttctgtttccagctgaagagtgttctctgcttttaacagctcatgtgattagattggccccacctggataatccaggctaatctcctgatttaaagttgtacccgccaggtgcggtggctcaggcctgtaatcccagcactttgggaggctgaggcgggtggattgcttgaagtcaggagtttgagaccagcctggccaacatggtaaaaactagtctctactaaaaatacaaaaattagccgggcatgatggtgtgtgcctgtagtcccagctactcaggaggttgaggcagaattgcttgaactcaggcggtggatgttgcagtgagccaagatcgcaccactgcactccagcctgggcgacagagcaagactcagtctcaaaaataaataaataaataaataaaaaagtctgtatcttaattacatctgcaaagtccctttgccatgaaacgtaacatattcagaggttgcagggattagagcatgaatatctttgaagggtcattattctgcctaccacaaggattgctggttgttctaaggcctgaactcatcctgggtctgatatgagtgaagtccaccctaaatcagcatgttggcactattctggcagcccaatactgcatgaatccatgaaagaaaaatcccactggtcagcaagagcaatctacttgccagaacaccctcttggaatgagatctgactaggatgcctgggacccccacatgggcatgaatcccagaatcccttaggcaatgtggtccactctacaagtggtatagggtttgagaacatccctaaaggaagaaacaggaactgaggccaacataggtccctgtctaggctcctgcttggatggaattgctgattctgggtgttcccaggcatgggagagggatccagagaagacattccacttgcagaggttccctgaggggtcagaattgcagccctgcttgcctgggtctaagggcaaggtggtactgcttccagcaactaagctggtaggagctattttaattttcatgcaatgtctctgtagggttcagttggcgttgtggggtagagtgtggggtttcactccagccagccttgatacaagtccttgatattctccataagctttatacaagtcctggatattccccatattggctggatgatcttggacaagttacttaatcttgtggagcctcagtctcttcatctgtatggcaaaatgaagacaataacaatgaaccctggccctgaaaggggtgagatatatcataggcattttatactcacatctgccggttataatttccacctttcaatgttgtgatgatcaagtgagctggcatatctcacttaaagatggcataaaaccacctggaatacaataggcacaccatacatttcaaccataaacagtgattgagcccaatgtcaggctgataaatgtgaaatcacaggttctccaggagaggaggggaggacaacttgtagtgtttgctgatttccatggtgtacatactcccaatggctcatttcaaacaaccagtctgttgtcagtggatgtggagttgggaagagctgacagtcagctctttcgacaggcacggtgttcagtgctggagatacagtgacaaatttgcatgaagcttaaagtagttctcttctctgtgctatttttcccccaacccaaagtatgagcctccagaatattttgcaaataagatgtagttctaggtagaaaagcgtgaactcagtaacctctcaaggtgtctctcagcatttgcctcaaccagtagaggaaatgttatttctggcttcttggcaagccagcagtcttgtttccacagagctgagttgggtatgaataaggccagaaatgctgctcctctcattggtttggggtttggtgttggtggagacatttcatttcctggaggcccactcggcaacactaggagaggagggtgctggctcatccattcacgatcatggggactgaatgacccggtgagaacaatagtcatttcccagttgtatgaggtcacatgccctgaccatgcccacgcttcactgtcccagagcatttcgatggtggggattccattatgactgacatctggtattcttaataggaaagcaatctcactgttctcaaagtaggaaaactgtttttggaaggttttagaatgaagcaggttgaaaacatctatgcagagtacttggaaatgtatgaactggtaaatctaaagagcacggagatgtaggttgtctctctctcactctcttgagtcactgaacacccgtactgtaagttgctttatatcatttctcagaaggcaatctcttttctcagggtaagtttccatgtaaggtgatattaagggtaaaaaaaaaagcacaatgcaagcactgtggttactggtgtttaaaaagggccattaaaaataaaattagtatctaccgtgtcttaatattgtatccaattggaatttgatataaaactgggaccccaatggaaattttttttagtgaataaacatacaatttatttgggaaggttgagattattttatttattcattttttaaaaccacatttggaaaattaaaataggtatttaacattaaagtcaagctatatgcccaagctttggaataaagaacagactctcagaatttcaaaatggctctacaataaaaatagaacaaattaacacttaaggataacagaaagagaactgcagtttatttttggagacagcatgggtatgggtgaagagggctttcgtttcactaatgcataggtgactggtggcttgtttctaggtttttccattctggaaaactctagttaatttctcatgtgtccaagatttagcactgttagctggtttctgcaataacttttacatttattatagaataatatatcattttatattattggagcttggagctcttgggttccatatagcaaatgtgcagtaagaatcagatcaattcttttctccaatttttctcttgtccactttcttttttccatgaagtctccacactgttgataattataatgataaaattacaataaaagcaaacatttattgagtgctttctgtataggcattattactctctgtttctgatgtggacctttaaggatgaaaatatattctagaagttggtatattaagttaaaatgccaagatggcatttctattttaattttttttgagatggagtctcgctccctctctcattctggagtgcagtggtgcgatctcggctcactgcaagctccgcctcccaggttcacgccattgtcctgcctcggcctcccgaatagctgggactacaggcgcccgccaccacgcccagataattttttgtatttttagtagagacggggtttcaccgtgttagccaggatggtctcgatctcctggcctcgtgatccacctgcctccgcctcccaatgtgctgggattacaggcgtgagccacgacacccagccctagatggcattttaagaggatattatgatagccttaaatactaaggtaaagtgcctatatttaaaaatcttcaatcatttccctttgcctgaaaaattaaaaacatggacagggtggtagtgatggtgtggtatgatcgtaagtttgtattttagatatatgtagaaacatatgaaaggtggattgaaacaaggagaggataaagacatgagttaggagttaggattgcaagataaaatatgggaagccaagttaaattgaatttcagataaacaagaattttttttagtacaaatatgttccatgcaatatttggaaaatatttggaacatacttatactagaaaagtatttgtagtttatctgaataaattcatatttaattgaatttcttgtatttttatttgctaaaaccggcaactctatttaggaggttactacagtagtccaagtaaggggaaacaaagaactaaaaagggtggtggaagaggaaattgataggagagtacggatgtgaaagaattgagaaggtaaaattgataggacttggcaactgataagagaaaatgatgtggctttagataccataatgtggaaagaggagccaggatctaataggctaattttctaatagaaaatttatatacttcaagggaaaacaatgggtgaactgaacatggagtagtggttctgtgaattgagagccttgattagtgaaatgaacattgaaagacattattgcaagtttaaattaaactaaaaatttaataaaagttaccttctttaaaaatagttaacatttttgtagatgtattgagaagtttaaatatgttattaatagcattgaggatatcagtctgccttttcataacccagataaatgaaagctcataacttttattcttctaaaacatttaaagttgtgtcctaaaatcagacaatagctgtttcatttttgcttagaaaatagtatattaaaatgaatcttttatcaagctgggcagaataacttttgcctcatatcaaccagtaggattaaagggtgttttataaaattctgcattaaaattattcgatgttacccccatgctattttagcacaataaaatagcatgggagtattttactgtattttatatgtacagggtacatatactgtgtatagtattttattgtgctaaaatagcatgggagtattttactgtattttatatgtacagggtacatatactgtatatagtattttattgtgctaaaatagcatgggagtattttactgtgctaaaatacatttagcatgggctgttatatcttatgactttgatctctagatatacctatttctaaacatatatgggtatacatttcaagatggtagaataaattagaaattgtaaagatgtctgttgagaccctttaaacttttataaagcctattctaatttattcaataaatatttattagatatctattatggacccagttttttaccaatagcttgaaagaaagtccctttcctcataatcttaaagaacaaatcaattatggagtaatcaagttgggatggaaacttcagataaaaaatgatattttcccattttacctgccacctttatccccgtttgtttcagagctgcagtagcgacctgtatctgctagggtccaggcagaagacagaaaccacatcaactatttaaacagagagaattttacataaagagttgttggctgggagtggtggctcatgcctgtaatcccagcactttgggaggccgaggcaggcggctcacgaggttaggaaatcgagaccatcctggccaacctggtgaaatcccctctctactaaaaatacaaaaattagctggatgtggtggtgtgcacctgtaatctcagctacttgggaggctgagacacgagaatcgcttgaacccaggaggcagaggttgcagtgagccgagatcgtgccactgcactccagcctggcgacagagcaagactccgtcaaaaaaaaaaaaaaaaaaaaagctgttaaccaggcataatgcagttaactaggtaattgagaaacaaaaggagaatgctaatgtatctcagaggaagcagctgcagctactattcctagggttggaggaacaagaggaaaaggttagaattactaaaacttagaaatttgcaggagtcttataacctgggacccagacctccgaggagggtctccagttggctagtgttgatgtctctggggagtaggataaggggcagtgaagctggttctgcaagtcttgaaaaaattgcaaagtggattcagctgctgctaatggacacacctgctgctgctgctggggtgaagaagtgagcctggggtgacatccacacaaacatggagcaagtccctgcttccttcttcagccttgcagttctccctctaacaccttctactgacagagtctaacacagatccagaatactatgctgccataaaaaggaatgagatcatgtcctttgcagggacatcgatggagctggaacccgttatcctcagcaaataacacagaaacagaaaactaaacaccgtatgttctcacttataactgggagctgaataaggagaacacatggacacagggggcatgggaacaatacacactggggcctgttgtgtggtggaggcaggagggagagcatcaagaagaatagctaatgaatgttggtcttaatacctaggtgatgggttaacctgtgcagcaaaccaccatggcacacatttaccaatgtaacaaacctgtacctcttgcacttgtaccccagaacttaaaagttgaaggaaaaaaaaaaagcagaaatgtagtttgcagactcccaggctcagcatcacaaatcatagtagtgtctatgtgagctgagggaccataacttgctaattggtacacctcctaaatacttcttctggattacctcttgccttctcaagtaggagctctgccctgaaccagagtgatcttcccaaatcccttcaaaatttctcatggctctcagaataagggcagagatccttaacatgacccacgggcctgtgtgatttgacccctgaacatttccatcctcatcctggacctcagtctccctccgtagcctggctggcctccagtccttgaggatgtcacgttctcttctccttcaggacttccatacatactactccctgtgcctgaaatgttcttcccctcctctttgcctagtttagttccatttgttgttgagattttagctcaagaacaacgacttcttcaggatggcctccttcatgccttagatggggcgatgcctctctattaaatgtttccatggcttttgcgcactcttcatggtttgtaattggattgttgtatttgatatttgtttccccactattatgagatacatgagtgtaggaataatgtctgttttgttcaccactgttttctcagtgcctacaaggtgtgtgacatgtagtaggtactcaacaaatatttatcacgtgaccgaagagccaaaccaaattattttgtaagaggaagcgtttattaccataatttaggatgctgctgttggttgtaagtactgtcattttattatgaagaaaagcagttggtaaggagcactctgaaaacatgtcagagccaagacagtgagagcagctgtatgcatttatttatttaaacctttctcaaagtgttcgttgctccggcttcaatactaacacagataggggtatcgtagcagagtcctgattgtgcgccactcagcccgggtcagtccgcttttacatgaagtgaaataaaatctgtacgtcctatattttcaaggcctcagcagcagatctgcccatgagtgcagaaaacagtgccccatgagaaccagagcaagtgggcaggcacagcaccatccaagttcattcttagaaaagaagtgtttcttcagaggaagcgtagtctgcccaccctacagacaaccttttacattctcagaagagcagttcgcttcctgctgtgacattgtctcaggcatctgtatttatgattagggtctctgctctacgaataaaaggcctgctccagtgattttccgagaacgacagattggtctgtaccaaaggtttgtttgagtctctgcctcacaagccagaaaagtgcttacagtctcgaaacgatggttccagtttttacccttcccatcaatgcttcaaagatgtgaagaccaagttacgggcagggcttatgcttaaagtaccatgagtaacatccccccagcagtgtctgcaagaagaaagtttcttacacatgtgtttatccattcagtcatccacccatttagctctcatttacgagtgtttactatgtatgaagtgttgttcccggcactggagctattgagttggcagagaaagacagatcacagttaacaagataatttcaggcaatgataagcggcatgatgaaaatagggagtgacttgtggcgctaccgttcggatgcgtgatcattgatgtgattgataagatgacatttaagcagaaatctgaatggccagaagggacccgtcttactaagatacggggaaagaacatttcagacagaggggacaaattgtgccaaagctctggagtagggatgaatttggacaagtgtggctggggtataggaagcaagggatctgggaagaggaacccagttctgagacaatgcatagaagagtgacctacctctttcatgctctgtaccatgttgccttttctgtatgtaggggcgaattgtattttgttatgtccatgcacaatttctgcttaggttcagttggagcattcagttgctctactacgatacaccaacagttaaacttcaaatatagattgggaaaatgatacagtgatgagcttatccttggatattttataaagcaactgctacattatattcttagggatgttggaaaatcaaataaaatgtggggtcatatgttttgttagataacaccctccctaacttagactgagttgcctcacgtgtaaatgttgtaaaaacctaaatagcaatgagatatcactacataccaattatggtggctaagataaaatatactgatatcaagtgctggtgaagagtcaaaacaaccagagctcttagacattgctggtgggaaagcaaaaatggtatagccactttgatggtttcttatgaagctagacatacacttaccataagacccagcaatcccacttctgcacatttaccctagagaaatgaaaacttatgttcacacaaaacttgtacgtaaatatttgtaaaagctctattcataatcaccaaaaccagaagcaacttaaatgcccttcaacagctgaatgggtaaactatgagacatccatccaatggaatactactcatcagcaaaaaggaagaaactactgatgcgcataacttggatgaatctcagaagcattatgctgagtgaaagaagcccatatgaaaaggccgcatagcatatgataccatttatttggcattctccaaaagacaaaactatagtgatggggaaagacatggggacagtggctagggctgggagcaagtgtgactaaaaaagaatagtatgagagaggtttcgggaatgatggaattgttcagtattctgatagtgattgttatactaatccatacatgtgttaaatttcatggaactgtaaacccatttttaaaagtcaattttgctgtgtgttaatttaaaaattaaagctaaaacctaacaacaatcaagaaatatattggtgtgtctgaagataaaaaggaactgtttaaactgatagtaaagaaaagccttaaatttttggttgtgatttctgcatgtagtaagttgaatttttccaaactgaggttatcgcattgaatatgaattcagaaagtactaattactctgtcaccaagaaattctaatccattagtagaatataatcagattcacataaattaaaaaataaaatatagtcaaacttctttgagcagtccaattgactgactgccacatgctatgaaatgaagatagtgctgcaaggaatgaaaaacaagatattgtcttgggctcctaaggagcatacaatctcatagggaggataagagaaggagaaaaacaataataataccaaacaattgagaaaagtgattacacaaacatgctaagagaagctcacagtatctctgcatgtggaaaggaaggagagaagtcatatcagattgaggatcacaagtccaactgcactcttgacttactgatctgatcttttgcagtctgcttttgagagaaagagataaacgaggagaaaacaagttaatttcagaaattttattaaaaagtaaaacaggattattcatacattgtattggagtccttatggagggagtccttttccagggaagatcgtttttcatggaatacctgataggcttaagcacactttgggaaacgttgtgcagggctcagagaactctcaaaagtggttttctgaaggtttgaatcctggtctagtgtcaggagatggggaggaagtttgggctaatgctgagtattggtccttgttagagtgaggcttcaggagagggaaagggccggtggattgccagcccatagacaggagagagggtcccagaaaagcccatgctctttgccaacttccacttctgttttggtacatgggctgtaggttactaatcctctgctagatttctacaactcgtttcattgttggatagctccagttattaatacaaagagcatctttctaaattgcactctgcctcccctgtggcttccaccctgtgggtctcattacaaccccagggtcctcacagatgtctgtttcttcctatgtgaccatgagtgaataacctaatttcttgagcctacttcttcttcctctgtaaaaccagggcaataataactactccttaagaatgttgtgagtattggctgggcacggtggctcatgcctgtaatcccagcactttgggaggttgaggtgggtggatcacctgaggtcaggagttcgagaccagcttggccaatatggtgaaaccacatctccgctaaaaatacaaaattagccaggtgtggttgcaggcgcctgtagtcctagctactcaggaggctgaggtgggagaatcacttgaacccaggaggcagagattgcagtaagccaagagattgcgccattgcactctagcctgggtgacaagagcgaaactctgtctcaaaaaaaaaaatgttgtattaatgagataatggacattagtcatctggcatagtggctgatacagtagacattcaatacatttgtatttcctctccctctctaaataacagcctttcaaataatagttattaggtatccctgttttatcgctctaagcaaagctttccctgtgcatgcatgcattcattccattattcattcatccatctattgattctacagttacttattgagcctctcctgtgtgaaaggccctgtgctgggcactgaggataccgtggggatcagagcagacagtgctcctaattctaatctcgtggagtctgaaatcaagtaaataggtgataatagttcagtgctgtaagtaccctgggaaaagagggaaagagagaactcttccaggttggagggcatattagtttcttgaggctgttgtaaccaattactacaaacttggtggcttaaagcaacaaaagtttattctctcaaggtcctggaggctagaaatctggcaggaccacactccatttggggactctaggggagaatcagtgccttgtttcttccagcttctggtggctccccagcatttctgggtttgtggctgcatcattccagtctctgcctctgacttcacatcaccttctgccttgtatgtttctatatgatcttcaatttcctcttttttataaggacatttatgatggcatctacgatccacccaaataatccagggtaatcttctcatctcaagatccttaactcagttacaactgcaaagacactttctccaagtaaggtaacattttcaagttccagggattaggacatatctctgggtagccattattcaacctactaccactacaagggataaggatgaaagaaggcttcctgggggaacagtgtataaaataggacctaaaaaattaggcagaattttgtcaggaggagaagcagcaagagtgatagagaatattccaagcagagaaatcagtgtgtggcaaaggccctgagttgagggagtgtggtgaatcagagaatctgcacggagtgtggttatggctggagcacatagtaggtgtgtgtgttgatgcatgaggggagggctgtgggaggagagacaggaggtgagtctggagagagaaaagcactggctagatcttgagggactttgatagctatgctaaagtgtttggattctatgccagatgtcatggagagtcatggaagggttttaagaagacatcttatgtgctcagatttgcaccagcctctggagaagaggtgaggggactcataggaggcaaagacatcaatcagagggctgctgcggccattctggggagagatgatggcagccagagctggctgatttctgcttctgctagaacatgattccagctccattgcgttccttgttacagggatcagacctcatttcccactgctattacggttcctacccatgcttgtcaattaatgcggtgattgattggtcacaggatttattatttggcttccaataagccttgggtttccaagtctgactgtggaaaaggagcttactcaactgaaacactttgtaagtgacacttctccatcccccttcctgtggcagcccttcccagcacaaagccacagaccagggtgagaggcagtggtggaggggcaggaaggtgggaggacaaatcagtgagacaaatgataaaggaggttcccagtatgctttctgatctttctggacttttttaatgggctaattgaaggaaaggtttaattaaccgaacacacacatatccaaagcctctgtaaaattggaattaggtagaattttatcagcggacaaaattttctcacaacctgggaggtgtccctctgtcactgatttgtctcaaatggttgcttgttttcagaagcagcagatgtgataagacctgcatgtttctgactgactgtatatgttggcctgttctatggttaagaatccgtaagcatcaagtcctttattttgcatctctggggtctggaagcagatttttatatatttctctcaaaatcgggtcagggcttccagagggtggagggttgcaaataatgaaaaggagtggaaatatgcctatagtattctgtagcttgaccaaatggtgattctcacagtgtggtcttcccaccctcttgtggatgaatcacttaggatcttctaaaaaatacagtttcccatgatcccctttagtcaaatgaattcagatttccagggatggagctcaggagtctgaatttttaacaagttcttcaggaaaccaaaacgctcatgaaagcgtgagattaactattagagctcacggaaaaggagggacaaataaatgaaatataaaaaggaggaaatgcctccaaccagtgggctcagacagaaaaggaatcagtcatgtaaattatggtacctccatgtcataaaacacagcaatcaaatacggtagatggaaatatactgacatggagataattcgacatggaactatgtctgtcatatactgtcaagtgcaaaatagtgtgtatgggataactccattttatatgtatatatgcatagaaaaaacatcttaaattcattcatccaaagaatatccactgagttatcagctgtgaacaagacagctagggtcctttgctcatggtttagtatgcatacatataccattgctaacacattatttatgggtataggaattatcttgtttatatgagtttcttaaaaattttctgtacttaacatgcatagattttgtaataaaaataacaaaaaatggatataaatactctcctcatggatccatttggttttatgagtcacattccttgcgggtatataactttgtaacagagtgcttttctgccctcatcttcttttacactggtttcttttgatcatgatctaatctttcttttctacatccaaagcatcagtcttattccactatctttgtgtgaacgaaaatcaaaatcatttaattcattacccatatactacgtatgggcatataaatacctgctttcataagttttgttcacaaccatctttcttgttgtcttctcttgtaaacattacgggtaatgtcttccattatggtactttcttctagttcagactacatggtgcacaggtgagtaataattcctggtaaagaaagtaggagtcaatgacaacacttatcagtttgttttaggtaggtctagagtctgtgagtaccccctgtgattttatgttcgattctgattagtccatcttccaggaccaaacaaaactgaacaggaactcaagtcactcaagtaacttaaataaggaggtgccttgaactcaactgtacttgctgacggaggggctgtagggtgaaaggagagaagcagggattttgttaggcagcctttctggcttccttttctctcctgaccagactttgcttcaagactctcttctgttttatagatgtaattccactcaacctcataactttataagttgtaggaaaaatgagcaggtgcaaattcttttaaattcaactttattggagcctgagacccaaggaagtctcttgggcatatattcagttactccagatgatgcaaatctagaaatgagaagtatgttttctttccttttttttcccctcttttggcttagcaaagccacagaaactctaggttattatgttttaaaatgtttttaacatattttcagcttacaaatgtttttatgtgatttcctccaagcagatccaattcctcatgcatttttagggttaaagtaatggtccacattcaagtacgtgacaagacttagttttcttctggaccagtgttagagcttagaactgtggagaatagaggtggtaaaagggatgaaggccttctccttgggacttcccttttacactccatgctctttgttaagctacttttactctgggaatgagagagaaagagcattgctgcactgtctgctggagatggccggggttgtatatatgttcatgaaagttataacttcacttcaggttgctttcacctaaagctaaaaaggctgtgatatatgaatcttaaaaatggcattctattattgtttaatcaatttcaatcccattgaaagtctcttttccatggacatcaggaaatcatttaaagcctcctcttaatgcacagcagaggctcagcaagtgctgtcaactctaatacaatttagaagttacagattcataagagcagctttgagtcttagcagcattcctgctagcatcctagtaaaagtagggctgtgtgtctagattaaaatggaaagttctgatttggcatctatatgtttttctatctaacactgtatatctgcatttaaaaaaacattttggtgcctgattatttgagttttcattgtgattttttgatacctgcctggaacctccaaaacatgtgaactcagactatttaggcttttaggaaaccttttaggcttagaccgtttaaccttttaggagggttttgttgctgccttatagaagctaacataagatgggtagacacttgagtgtgctggttggccaaagaaaagaaatgcaaagagggcagacaaagaaaaaaaaaaaaacacatgaatgtaaagctatgccactttttttcccctctcataggtaattctggaacactttatttattatatctactgtgtgcacacttactgttcaaaatcctgatggcataacaataaaaccaaggtggttcctgactttaaggaatagaatatggggagaagatctgcaaattaacaagggcaatggagtgttgttgatgttgacagaagtaactataagatccagtcatggcagaagagtggttggtaatctaccggggtggagatgagggaaaaggaagaggggaaagactgcatggaaaaagtagatcttcatcaggttaatgaaaaacagggcagctcaggcagaaggagaaaatcaaagtttcagagagcctcgtaggttcacaggattggtctgaccaaagagcagggtgcaagtggtggaagattcaagaggtggacagcaacctccagagaaactgggtcttcatcctgaccattctgtggactattattaaacagtcctcaggtcagcacctcaggtcactgttgttctttggtcatttaatgctcagttttatgacccaaaatcaatgaataaaaacagaataaaacaatcagaaaattttcacctttatttaattagcagatttttttttaaaagataggtatgttagaaaagttgcaaaatctataggctgctgatgggcatgtaaactgatgcattttgcctaatactttctacatatatatcaaaagccataacattctttgactcatggtcccgttgctggaaattaatcttttaaatatttatttatttatttagtagaaacggggtcttgctttgtttcgttttgtttttgagacggagtttcactcttgttgcccaggctggagtgcaatggcacgatctcgactcacagcaatctctgcctcccaggttcaagtgattcacctggctcagcttcccgagtagctgggattaaaggtatgtgccaccacgcccagctaattttgtatttttagtagagatggggtttctccatgttggtcaggctggtcttgaactcccaacctcaggtgatccgcatgccttggcctcccgaagagctgggattacaggtatgagctactgctcctggccggggtcttactttgttgcccagcctggtctcgaactctaggcctcaagcaatcctcccgcctcggcctcccaaagtactgagattacagacgtaagccaccaaggctggcctgaaaattaatattaagataaaacctgggaccagtttcttttttaaagttttaaaatttttaattgtgatggatacatactagttttacatagttaggggtacatgtgatattttgatagaagcatacaacatgtaatgatcaaatcagagtaattgggatactcatcacctcaataatttatcatttcttttttaaggaacattccagtttcacttttagttatttggaaatacggaatttcatttcttgcatacacataggaaccatgaatgactgtggtacatacccatgaagcagcgattagaaaaactctgtcttgtttggggaggctgcaaggaagcctactacaaaagtccacggggtttgaattagaactccctgcacagagtaggtaagccaaaccaaggaaatcacattaaaagtagtctattggccaggcacggtggctcacgcctgtaatcccagcactttgggaagctgaggtgggtggatcacgaggtcaggagattgagaccatcctggctaacacggtgaaaccccgtctctactaaaaatacaaaaaactaaacaggtgtggtggcgggcgcctgtagtcctagctactcgggaggctgaggcaggagaatggcatgaacccaggaggcagagcttgcagtgagccgagatggtgccactgcactccagcctgggcgacagagcgagactccgtctcaaaaaaaaaaaaaaaaaaaaaaaagaaaaaaaagtagtctttatctggtaaaacacatagtgctccaacagaagcaaactagaaactgcctgataagaacatctccatacccgaatgtcctggaatgtcaacagtaaacaactccagtaagatgagctcacagtaaaaaagtcacaaacttccaggcttccagacctccaactacaaggagcataactgaccaaagtccccagatgctgtgttctgacgtccatccctgtattcgtggtgcagttaaaaactttcttttcttttcttttcttttttttttaaggcggagtcttgctctgtcgcccaggctggagtgcagtggcgccatctcggctcactgcaagctccgcctcccgggttcacgccattctcctgcctcagcctcccgagtagctgggactacaggcgcccgccaccacgcccagctgattttttgtatttttagtagagatggggtttcaccatgttagccaggatgggttaaaaactttcaagcttgccatgggctgttcctagccaatgactgaatgagtcagggatactgaggcagccccttcctgggagatgcaggactccgtggatagctgtttttagcatgataattctctggaggcttttctgaaccttcctctactacgtggcagttgggggtggttccacccagccttccttccgtctctcgatcaggccgattcttgcataacggtctgatgtctctcccagccttttccagctccctcctcattttatctcacagacatttcccctaatacaatccttgcatgtttaatcccattttggcacttgtttttcagaggaaacaggctgtaagctgggaatttgggactggcttttccaccaaatagcaggtgaaaaggacacagtcttggctagcgggcgactacagattgtccctggcacaaattgctaaatgtttcaccactggtggcctgtgaaaatgttcaggtggagggtagtagtgagtaaggtgcagtgatccaagatattaaaaaatatggagggaataatgcatacagagacagttgctttaatgccccacaaaaggatgttggcagactaaggagtggaggcagtttattgctaagtttgtgagccagaaaacctctgtgatcaccctcaaagtggcccagatccccagcagtaggatagatgtagctgaggggcagaatgaagactcaattgttagagtcacagagcttcagagatgtttgaatgctcaaccaaagcaggtatattatgcaaaggtcagggacctggtgggaccctgttgcagaatactgcaacatgggatggggacatctggatggcaccctgaggatgttcattcttcaaccccctcagatcctctgggcttgcagatgtggctcaccttccatagtaaaggctagcagttctacagtgctggaagatgctatagaaatctcacccctgtaagaggtgccacttcagaatctgcccccacctcctctcttgcctgccaagccaataactaggattgaggtcatgctgggcctggtaagttaagaaagagactctatgcctaaggaattgcaatagtttgccagcattaattggcagaagccaggggaatactcctaggatttgattttgagggtgcttgatcaaagaagctaaaatgtaagactagataagcaagaattcattgacctaagggcactttcttgagacctgatatttaacaccctagaaaagttgttgggtgatagggcaaacttattgctgggtggctcttagaagcctggataaaaaaatagccaactctcatgaagtggaagtgcctgaattaccgtggcagatggtagacgaataaagggactgaagaggtagagacgctggaatggatatattatgtgagaccagaagacccaccaagaggaggttgatgttccatgacagggaccagagggaaaatcattcactagggttataaggaatatgctggtgagaggggcacgagcaccacagtggtttcctcctttgcaggtaagggattatggcaagagaggtagtcacagagttgagtttgttgacatctatgaggatgatggagctctgggaagccaggaggctgactgtaaaaagaaaaaaaaaatacaggtaaaagcagaggatcaggagactgagaacaactgctctaataaaaagccacaatcctttgtgcagttcctgaacttgagccaattttcagatttgtaacccattgactgaagaggtggcctggtactaggaggaaagacccttcagcactatggcaagaatatactgagataattccctcagtccttccccaagggacttatgatcccttacacggatgaggaagaggggaacaaccactcatgtttgggattaatggacacagggtctgagctgacatcagtacttggagacctaaagtgtcatcatggcaccccttgttagaatgacagcctgtgggggtcatgtaatagatagaatcctaagaacccatccagaggtggttgttttcccagtccctaaatgtacaattggagttgatatatttggaaattgtagtaacctccacataggtttcctggtctgtagaatatgagctattaaagtaggctaaattgaaacttttcaaattgtccaacatctttctcacttcattcaagataataaatccaaaatatcatatattttggagtgagaggatggtgaagataaatgccatcattaaaggtctagaggatgcaggggtggtggttcctactttatctctatttaattcaccaatctcgttccgtagaaactgaacagattctggtggtcctctagactgccatagacttaatcaagcatcagcccaaagagcagttgctatcccagatgtggtatcattcctagagcattttaataaggcctcaggttcacggtatgcagacactgatttggtgaatatgttcttttacattcccattagaaaagacgatcagaaacagtttgcattcatgtgggagggacaacaatattcatttacaattttgtctcaggtctatgtttctgccaccctctgtgatggtgagtctgaaggaactggactgcctgaacaccccacagaacatcactctgatctattacattgacaacatcacgatgattggacaagttgagcaagaggtgactagtgtgtggtgtcttgggaaaacatatgtgctctagtggttgggaagtttcagtgaagacttttagaggttcagtagtcatgcgcatgctgggatatcccctccaaagcaaaagaaaaattgctgcatcttatatcccctatcacaaataaaacaacatctggtaggactctttgagttctggaggcaacacatcccacatctagggatattgcttccacccatgctccagatgatatggaaggctgccagctttgagtactgttcagagcaggaaagggcaccacagcaggtccaggctgtggtgcagcaccctgtgctatttgggtcatgtaatctggcagatcctattgtgtcaaaggcatcagtggtagaaaagatgcagtgtggagtatatggtatgctccagcaggagaatcataatgaagacctttgggattctggagtcaggcccttttcaacagggaataatatgtccttggagaaaaagctcttgatttgttactggaccatgatagaggtagaacccttgaccacaggactccaagtcactgtgcatctgggacttctcattataaactgggttctattggcttcaccaagccataaagtcatatggacccagaaacagtccatcataaggtggaaatactaaatctgagatggatccaagaagaatgagaggatatgagcaagctaaacaaacaggtggcccagactcccacatcacccaccacaattgcaccagggcccctccctcagcttgcgcgtatggccaaatttgggattataattggtgtttcagctgaccaactgaaagaggaggaaaaagccgtagttttgtttacaggtggcttggcttggtacttgggtacaaactgaacattgacagtagctgcattatagcctaattcaggggcggccctgaaggcagtcaggtggaaaagtgttcccaatggacatagacatgagccatgtacccgatcatccatttgtgtggaaggagaagtggcctgaaatgagaatatagatcctggaaggtgaccaatggcctggccatctggtcaagaacctggaaggaaggttagagaaaaggaggtctttggaatcttatggctagacatatggaagtgggcacaaagtgcaaagattttgtatcttacattaatgcccaccagaaagcatccaccatggaaaaggcgctgaacaaccaaatgaacaaagtgatttggtcatttgacattagccagccttcattactggtcaccccagaactgatatgctggacatatgaatagagtagaagagatggaaatgacattttggctcagtagtatgaattttcacttaccaaagtagatttagtgacttattttaatgagtgtacaaattgttagcaacaccaagcttctcatatggcacaattgggtgacaggttgattacactgagacctttcaattttgaaagggccagtggttcatcttcacagggaatgataactattttgagggtagatttgctttttctgcctttggggcatcatatcaacactattatcctgggacttactgaatgcctggtccatgtacatagaacttcactcttaatatcatctgaccaatggacccactttacatcaaaggaggtttgaaatggactcatgttcatgggatccactggtcatatcacattgtgtacccaataggcagctggcatcataggattctgcaatggccttcaaaatttgcagctaaaatgttagtatggaggaaacacttagaaagaatgggctattatccttaaggatgcaatgcatttattaaatcagagactcctatataataccatatcctcagtaagaggagaacttgagttcagaagtgaagaggtggaagcagagtgggtccatctaccatagcttccaataacccatttggggattttgtgcttcctgcctttgctactttggtcccccaagggtgcacattcttgctagaaggcccaagtgtcccactgaaccacacattacagaggctggtaggacactttggagtcctgtttccaaggaccaacaggcaggaatcagagtcaaaatacaggcagggataataggtcccaatcaaggagaccaaggctggttctatacaatggtgacagggaggaatacaggtggaaaacaggtgatccacttaggtgtttcctggtattcttgtcccattataactgtgaacaaccgtgtaacaactccaaacagtgaagggtatgattcttaagggcacacactcctcaggtattaaggcttggatcacatgaccaggtaaaccaccaagacctgccgagatgatagctgagaatgagggaaaggcatttagaatggtttggggaggagggagagaggaggaccagttgtggccttgatcagtcacagtgatgggagttgtccatcccattaatctccctcttctgagtttttttctgaagaagaaaggctcacaggaatcactaaagaagagctgcctgaacttttgtggacaagcggatcagcatggcataagggacggactatggcatccatgaggataagccttacagaccctctcctataagtagtgtaatggaccaaaggcccaagccgcttcactctggcatccattgccctgtgtcttagtccattcaggctgctataacaataccataaacggagtggtttataaactacaattcatttcttgtttttctagagcctgggaagttcaagagcaaggcaatggtcattttggtgtctggtgagagaagataacttcctggttcataacagctatcttctctctttgtgttcacatggtgggagaaagagagagggaactctctggggtctctgttatgaaggcactaattccattcatgagagttttgctctcatgatctagtcaccacccaaagattccacctccaaatactatccaattgattaggatttaaagtctgaaatttggtgggacagaaacattcagtctatggtgctctgtttatgctgaggtcttgcttcctataagctgcttccagccagtgactgagcagggcgggaatgctaaagcaagcctgttccaggtgctcacctcagatcaagatgccctgacagtcttgtcaggaaccttttagatttcactaggttctagaccccttccacccaacttctcttccttctatccttcacttaggggtcaaattttcatcatgatctgatggttcttccagattttctcatctccctccccatatttttttagagacattcctctaacaaaattcgtgcttgtttaatccaattttggtccaaaatatcaacagttctgaggttagggaatcttggcttagagaaatgatgacagtggacattggatatcaatatcgatcccattattttgtgacagagctctctgggattgatccaaatgtcagatgtcacaccaagaaaaatgatgtttctgagaagcattcagaataagactaatagtgtcttatttccaagggtcaaagtaacttgctctgagaatgcatgaacttaattcttgcctttccttctttccttcttttccttccctccttccttccttccttctttccttccttccttccttcctccccctccctcccttcctccctcttccctcctctctctctttctcgccctttctctctctctccccctttctctctctctccccctttctctctctctctcctctccctttctttcttttttggccccactgactctgtctcaagatggtaattagtaactgacaatgattacgctatagttccatcatgaaaacataattctcatgccaggagtttatgatgacttttagtttgaaatttctcaaggttcagtttcagatcaagggtgaatgttcttggaaagtttgaacttaatcagaaacattattttagaattatgatcttagagtaatttctgggtttttagatttggaatatatatatatatatatatatatatttttttttaacagttgtccactcactgctcagagatctgggttaatatatttatcatttaataataattttttcctcctcttcagttcttacacatttgcacaaatttagtttcacttctactgtcagcactgcaccccaaattaaaactgaattcactccagcttcaagttctaactgggtcaggtttgctaagaattaagaccagttttatcaactctttttataaaattgacttgggtttcaagagcgtaatgaaaccagaaggtgggggagtttagaatgtagtctggtctcaattcgtctgctgtttgaaaaccacggtctagtttcaaccctactaaccttggatagttgaattaaaaaaagaaaaaaagtaactggcaaatcccagcaatccatggaatacaatagcatcttttgaaggacaataaactcagaaaggaaaggaaacatggaatttttcatgtgaggtttgccaatagagtaaaataatcgtatcagaatttaaattagtttttgtctcttcggagagagaccttgagcctccctctgatgctccttagatgcttgggcatctaagcagactttatttatgtcttttatctctatcttgatcaatttctttcatctgtgttcctaatatctcagctcccccatctgtctcacctcactctgggctctgtttcacctcagtcctaattgaagttataaaggttttacgtctcagtacttcgttgaaagagccttagccctagtcattatctaagacttggattcagtgcatttcacatcgctgagctctcacatggctcctggtcttggaaatggccactggactgcctccatagtcaggtaaggcccagcttttccacggtcccttttgcttggatctgagaggactgagtttctgctttggctctcttggctgccttgctctgaccagttcttttcgctgaggccagaagccctgacccaaactcttatctttctatcctgggagctggggctcacccatctgtgggcccaccttcccaatgaagacgtatccagctgcctgcctggtttccttcttgtgctctatatgcctgcctgtatgcgttatcttttctttaggttctagtgcggttattcgaattatgcctggtaaaagtttgtcatcacacctgctctgatcccccaggggggcctgatactcggctgcagtcctgcacaagtggtaggtaaggaggaaatctccttcctctccatctctacttgccttgtacggttgtaaggcaggaacatgccttctcctcaattctcaaaatgtaatagctcatttctttttctagtggtacactgccataactgaaaatgtttctggtattcaaagacctgtagcacaatctttgcaatatcttgaaaggcagcgcttatttattgtttgaatgtgaatttgatttttcccccaacaattctctcattaactaaggacagttggtgaccaaaccaggtgttttccactttgtagcaaaacgaagacacgatcacaaagtaataacacactgcattttttctcccctataaaagtgagaataattccaagaggtatcccagagatgttctgaacaaggacagcatcactggaaaattatagccttctaaactgacatatttgaagggttacagtcacttggactggcagttttatattcaccttcctgtaaagatgaaacaattgacctttcattactgagagtttcttgaagctatgatgagctgtggggagccagccatgcttacatttccctgggattctccttgttactggtggagatgtctccttaaatattatactattgtattaaacttaggtaaataaaagggctccacgtgctaaagaaagatgagcctcttttccttcttttgcctccttctgccagagaagaggctggcatggtcgggagccttggactatacgtatctttaagtaggaatattattctgacagagaggaatcagccagagaattattctaaaattgcataagattggtcccttaattttctgtccatggtatgctcaaggtcatgtctaatttattatactgaatgtggaatttctgggaattatctgatacctgattctgacagttttaacccttgacatctgaagtccactgtaaactgaaggtagtctgcctgacatgcttggtgtatcttgtatgatttctgtaaagttagaaactgaggacatgcactcagaaaatgcaaagtcagcagttgatgtggagccaggcttagctctctgcctttgagggtcacaaccagtaagagatgaaccttaaagttctgattcccatattcaaggtctcaatgagtttgggcccagatagctcaggtaaatattaaacaaatttacctctttctaaaatttacctatgatggatgtctttaataccttggttgtggtttcaaaagcttaaaaaaattttgctccactaaagtgtcactcttatataggtcacataatccacttatttgcatgtcggatggaccatatccaataatgtaatttatctttggggaaaagaatgtgtttcttaatgtgtacagtatcttttatagcatttcaggaaagttaacacaagaagtgctttacggttattgtgatgatgatggagtaaaaaaagtggagaagccgatggtataatacattgtgctagagaaattgcttctttgatgtatattctagaaactagagttctcatatagactaatcttggatttcaaatctctgcatgaaagagaagaagctaaatccatctcttatctcctttcaacttctccaaaaaccggaatgccaaagttctgatgacctgacatatacttagtgttatgtaaacattaaaaggacttaatttttgttgtttgtaatatctttttttctaaccacaaagtaacacatatacattcataaaaatggaaaatacagataggtaaaataagaaaataaaaattttatgtaaaaattatgtaagcatcactaagatgttactatatataattctacgtatatttttggtttaattttacaaagcagatcatactctaaatatgattttctaatctgattttaaaatttatatatcatgaagggaaaatacacttttaattaaaaattgttgagagttgaaagtaagagatccttcctaatagtgccttcttatctctcaggtgagaaaaactctgatgcaattatataactgaaataattcacatttaggcagcatcagagccaggcctataactaaaacctcctaaatcttgggtaactactttatgcattttacaggtgtcctttcttacttttcatatgctatgactaaatccagtgtgattaattggaattagagagcatgagaaattcttatcttcctcttatgtcctttagcttggctaaatgtttgctggaaaacagtgggtaggatcgattaacacagaatttattgaaaatattttaaagaaataatttgtacattttgtgatgagttttcaaactttaaagcttcaaattgaggtctctctgcaggaacgacacgatttgaggcattgaatcttggtaacatctcaaactgctataaatttctaaaaagttgttatctgactcagtgtcaacagaaacatgattaaatctaagtaagaatttccttttaggtttgcgacttcaaaaaaccatttatgctgaagaaatttgagttaaaggctctaaaatagattcaatgaatcttatcaatcaatcaattttatttgctaaatttagtactagagtgacattatctgtacattctttgtataaaaacatctagcagagcacttttttggggttttgtgatatcaagaggttttgggaattttaggaaagttccacccacaataaaaaccaatgttctcttattgctgattaattctgtcagatgggtcagaatcgatgcttctttgaatacatgcaaattatccttcatttaaagtttctgttttgtctttcttcctttgtttcatttgtttgtcatttctcttattcttctcattttcttctttactctcattctcttaaaataaaaatcttaaggatttcacttatttttttcagtttttctttgctacaggagatagtgaaatcagtgagtaaaatcaggttatacaaatggcattcacttacatagacattttatgatgttaaactaaaaaaaaaagcctggttatttggagggagattcagataatttggaagtgatttattttctcaaacggaaatagtgattacaaatgatgagaaaaagaattgcatttatttggcaacatgatcataaacttgcttactgaatttatcctataaatcaggataataaattccagtggcaaacatttaatttttaaacatcataacttcctttagcttttttttgtgagcttaaaattccaaataaacttacttgttctcatgctcacaattgtctattttatccaaaggatgaaatgcaggagatgcatttgatggaagcttcttgacctgcttatattttaagagcacaggaaacacatgtttctggtgttttctacttgtcagcatttcttaaccgatggaacagaaatgtccagaactacaaagttcaaactttgcatgtggcaagaactttatgtgatcagactgaatctaaataatgttgagaaataacaaaaatataagcaatggatttctaagcagacaatgtcattgccatgacatggtcctattaggtgcatacagaaactgagctctatgcgtgtgccagacaaaaaccaaagagcttcggttttaattacagtgcattactcttattaccctcaacaggttctgacgtgaccatgtaaatacaattatttagtttcttccttatggctgaagtgttgggccagagattttcctcttagaacataatctgtgaaatgggtctactaaggaaagctacttaatgtaaccagctccttctaaatcatattctcctaaagcacaccggaataatacagttcattgggccaaagttttctaacatggcttccctccatctcatttagttagtccacagctgagtaacctgttagaaaattgtgcccagcagagggcagagccagtgatccatatctcagattctggctggtgatggttcagtgtgatgtgggatcagaattgcagattatgagaaataaccagaatctttcttccttgcctcagcccatggaggatgtgtccaccagttcattcttttgacacttggaaagaagtggaacgtggattcagatttggccagattacattcagaggagagtaaaacatggccaataatactgtaagaccaatggtgtgctttctgagacggtgaatgcctatagaatctgtcaatatgaccgtatttttgcgtgtgtgttgtaaagtgcatataacataaaatcgacgattttaaccgtttcaaagtgtacaattcagtggcatttcgtatattcacagcatcatgtgacagttaccactatgctgctccagagcgttttcattacccgaaaaggaaatctcataccgccaagcagtcattccccattttcccctctcacattccctagcaatcaataatctgctttctggctctacagacttgcttattctagatatttcatataagtggaatcgtacaatacgtgtccttttgtgtctggcttatttcactcagcataatgttttcaaagtttacccatgttgtagcatgcaccttcattcctttttatggctgaataatattccgtggtgtagatagagtacattttgcttatccattcatcagttgatggacacttgggatgtttccactttggctgttgtgattaatgctgctatgagaccatatgtatatgtttttttacttaaatgatttgctgatttgtgtttgtgggtacccaagacctagcaggaagtttggtggggctgggtttgaagttgcaaactgggcagaaaactagagccagaagccatgccagttcaagaggttctggggaagatggtgaatgatggtaaaggcagtgagaagaaaatcacattagagtcaagggcccttggactctcatcttggttctgccaccagcagactgtgtgggtgatttgggtaaatcatttcaccttcctgggccttcatattctctctttaaaatgagacagcagaactcactaacatttcttctagctctaggagtcagtgcctgccacagactgtgcaaacaccctgtatttcttgtcacctaacacacccttttccagcatcacagctgctatcactcacactgtaaacagtataggtactctttttctatattttctgtgctcaaggtttgggcttaaccatttcctctgaactggaagtatgaagagggtcagggcctggcatcattgaaatgtggcagtcgcagcagggcccaaaataacacagctcaaaatatgaaagcaatgtctctgtaaccaagaaactgaaataaatgctcgaggctgagattatatcagccacaaatatcatggaagaaatgggttccatcaaatgtttggcacttccaatgttactctttatagatagctagcaagttttggggtgtaggtgggtggttcattcagcattaaagatgatttgtagtccatgtccaagatttccttctccttgcactaagacaagaaaatattagtgatttgtgaagtttcttcttttgtaaaatggaaatggtactgggtaatctcagctcgttctaaatagaaatcaggtacactcctgaatgtaccattcaggtggggtacattgtggggagggtgtcgtgggtcaaatatgggactatttacccttccctttctgtttatttctccttgacaatgaaagaataagatctgaatatgagaccctgggcaagtcaattgccttctcaatatcagtttcctgatctgtaaaataagaagcttacctattttgaaagcatctatttttggcttttgataaagccacttacttaaatttatttgtggctggctgtgttacaacagggctgagggattaagaaaaaagacaaaatccaactttaattttacttttaggagtgagaagctaaggacattgacagacaatcagagatgataatgtctaaaattcaaaatataataacagaacattatccataagtggagataagatattcaaaagatgtaatcatataaagagcttaggcaattagaacacagattccctgtacaaatcgctttgtgaccacagttaacttattattattattattattattatttttgagacgtctcgctctgttgcccaggctggagtgcagtggtgtgatctcagctcactgcaacctctgcctcccaggttcaagccattctcatgcctcagcctcccgagtagctaggactacaggtgtgcgcccccacgcccagctaatttttctatttttagtagtgatgaggtttcaccatgttggccaggctggtctcgaactccggacctcaagtgatctgcccgcctcagcctcccaaagtgctgggattacaggcatgagccaccatgcccagccgacttattatttattcattcaaaaatatttgttttcatctctatataattaaatctgtgacaggcaaagattacccttcaactgaagcaggctctgcatttcattgtcatccaaatcagcaaatacaactttgcttccctgacaaccctgttcacaatgtaaactgaaaagccaggaggaacctactctgtttccccactaaaggactgacaaagtccacagctcagaagcatccattttttacctgattttatgattggcttatagtttcctagggactgaaaattaatctaccacatttatttaactgggttcttgcccagcccatattttcaccctttaatggtaatgaagctaaaatttctttccagtcactttgcatatcatttcctttctctttaattctctttcgaagtgagatgattgatagattcttcttcagcagtcacttactttggtagatgattttctttttcctttgaagtcgattttgaaaggagctctgtgtgatgagctaattagcacaaacacacagagtatataaccttaattaggcatgattataggctcaacgtaatgggatgtcctgaaactgcacactatgcaaatattagacttttcattcttcccattacatcggaaaccatcaagcaaaggatgttttgcagtaggtaccacagtcaatgccaggtgcaactctttcaataaaaggttgatttttttaaaattgttttggtatactagttgggtaaaggataattggaggaggtttagggaaaaagttcaaaaatctgaaaagctgaattcagttcagaatgagctatataagctgaggaattttacaattaagtaaacaacccagttactctttaaactctacctcttttggaattctgaagatacttcaccataggcaccactatgaattatgcaaatcttgagagatctttcaaacccagtaaccactaagagtactacaaaaccaatctggggtttactcaagctattaggatataagaagatagtgagtataaatgaaatcacagtgaatccccaagtcctaattttagccgattattttcatttcctttaccaccaaccccccacctttttttcttttataattggagtggtaaaaataattagcaaattgactttccccttcctaacctgaaatgaaaatatccaaggatgtggtacccttagacatttgaatattcagccactgaataattgagagcttataatacataattcttagattatgtgtagagttgtgagtttttagactcaatcaggtaaaaaataataagccgtttggttccagacactcatggaaatactgacagggcagaaattcaatatgtgagtattagaataattagtatctgattttaatctaaaataccatctattcagtagaaatgataatgaaagagggtttatataacagctgaaatttaaaatccatagcgttctctgtgtttaatatgtaaactaatttttcctgagaacatagtatatgataggcacagtgttcaataacttattggtataggctcattgaatcatcgcaataatgatacaagataattcctgtaaattacccatattttacagatgaggaagctgaggatcagagaagttaaaaaatgtcatccaagatcacatatccagaagctgcagagccaggacttgaactcatgtctgtctgactccagccatgcttttaatcactctgctgggctcattagtacctatcaggcctatgattgtgtccttagtgattagcactttccccagagctggaaatgagatgcgagagaaataaaaatgcttgagatctaaactgaaatgcagaaattctctattatctactaggtacaaaggaggccttgactaggtgctttgtgtgtgttgaggttgtaagtgctgtggaaatagaatttggaggaagacagacagaattacacatgattgactataataaatacaaacctatatgatacaacatgttattgctgtacataagataacgggaaaaatcagtactgaatgagaatgagaagacgaagatttcaatctagtttttgccacataccaaatgtagcactagatcaatgagggtctcaacaggcaacagggggttcaaataaaagattcaatgaaagaactactttgagaaatattaagaagggttaggggtggaggttcgtaatgcacccagacactagcaacagtggaagctgatagcacccctaggatggaaagattcttactctttttttaagattctttaagattctttaagaatctagggtaagattcttactcttaccctaggggaggtaagagtaagaatgggcatcatagaacaagggccaccaaacaagagctgtacttgtggagaggtactgttactaccagacacatggccctgaacctgggagagggcagggaagaaagacctggacttccaccttgtgctttctgatgtgctgggaacttccaatgctaagccctcagaagccaccctgacagggaactaatgagacattttctacaggggtctgtcccaggtggagcttggatctgaggaaaggggatggagaatcaccttcggcaagtcacttttcctctctaaatttcagtttgctcatccctcgtttattgcctaccatattatcaataatataaatagttggccttataatttttacttcgaatttttttgaaaaacctcaaatttacaaagaatttgtaagaatagtaccatgaatacacacatattcttcacctagattcaccaattgttaaaattccatcactgctgtttaattctttttatctttctctgctaacacagacacatatttttgctgaaccttctgagagtacttgctgacattctgacacttaaacctcgaatacctaagtattatctataaacaaggatggttctctacataaccccagtacgatgatcacattcaggaaattaaacattaaggcaatgctattatgaaatataggctatactcaaatttcccccagtttctcagtaatctgctttgtattatttttttcaatcaataataacacattaaattctgtcatcatgtctctattttctcctttaatctagaatggttttccaggcttttccctttttaatcttttgtgatgttaacatttttgaagaatctaggccagttattttgcagaatatggatttgtctgattatttcttcatgcttagattcagttaaaacaattttggcaataactacacaaagttgttgtgtccttctcagtgtattgtatctggaggtaccctatgtcagaacactccatcacagtaatcttcagttgggatcacttggttaaagcagtatctgctagatttatcaattatcttttccctattgtaattatcaagtaatctgtggggtggtatatgtgaatatatcttttctcaccaagattcttttacccagcattttttttacaaccatttgaattttcttgctatgacagaattagtttcataagagcataattaaggaatctggtaagacgtctttgaaagttctaattacaaccctcatctcttcttatgttaaactgtcttcattcatttacctacctatttaacaaatgtttaaagaatgctcgttttgtggcttggcctgtgacattttcatcagtggcttcatagttgcctaaactaatgtctcttcctgtgctccagaatcctattggcaactattttccatggatgccataaactcaacatactcagatgaaagctgtcatttcactttctcacctgctcttcctgttatttattccagtaaattgcacctctgtcttctcattgaccctataataagaaaggcctatttattgagtggctatctgttacaataggccttttatacatgttacatgcattatctcatttaatcttttcaataatcttgagaattagatgccattatctggaggacattgggctttgagccccaggtcaacagtaagcaagtccccatgctaggatacaaatccagttatcttgggcttcaaaatctttgctttagcatagtgataaaggtatcactggcttcaaatcctggctctgccacttcctacgggtgattgggtaagtcaccttaactttcaatgccttgatttccttctttataaaatgggaaaaatggtaactcttgtcttgtagggttgttatggacttgaaagaaacaaaacttgctgggcgcggtggctcacgcctgtaatcccagcgctttgggaggccgaggcgggtagatcacctgaggtcaggaatttgagactagcctggtcaacatggcgaaaccccatctctactaaaataatacaaaaaattagctgggcgtggtggtgggtgcctgcaatcccagctacttgggaggctgaggcaggagaatcacttgaacccaggaggcagaggttgcagtgagccgagatcgcgccactgcactccaacctgggaaacaagagtgaaactctgtctcaaaaaaataaaaaagaaaagaaagaaaacttgacatttgaataatttctgcagcaccacagtacttctcaaaccataattctggtgtcattcattctaaacttctccttccactcactgattgtggactagtcccatagggacctcgtcttcacagctgtcattaccttagtttagaccaggggttggcaaaccatggcccacaggccaaatccagacttcacctattttcgtaaatgaagttttattggaatgcacacacacccatttgtttacatataatatatggcttctttcattctaaaatgacagagttgagtagtggcaacagagaccccaccgtttgcaaatcataacatatttactattttgcccccttcagaaagctttccaaatcctggtgcctggcgtattccaatagtcttcttcccagtcttcctggttacatttctccctgaacccatcctccccatccctaaaatttcccccaaatgtgaactcagtcataccagtttgctccttatgtttcattggcccttgctgctaagagcatccgcttgcaccttctgctcatccccagacaagctttgtcctgtgaccataatgaactcttcatgccgtttccaactttagcccatgttattcttcttgtctgaatatccacccttttctctgttctcaataataagttcaggcttttcgtcttctgagaagccctttctgacttccacaggctgaaccactggcttctgctcctctacataatacttcaattccagcattgatctcactctatcatgatcatgggtttagctgtctgtccctgccactgctgtgtgttcctcttgagggcaggaacatttgtttttcactttttaaaaaacctctgttgcccagtctggcattaggaagtgcccattaggttgttattgcttgttggcgcttgagctggggcttgaaggtttctataatgtgtagcagtgtatagaaaacaggcaggtcagaaaaggcttctgtgcatcacaccaacatggcacatgtatacatatgtaacaaatctgcatgttgtgcacatgtaccctaaaacttaaagtataataataataaaattttaaaaaaaaaaagaagaggcttcctggaggagatgacagctgagctaagtcctggaggatgagaaggagtataaaataagataataggagaaaaaaggcagtaggaacagcatgggtaaaggtgatgaggcctgaaagaggcacgtggaaggaaagacaaatgcaggaagggggaatgggagggaatgctggggtacaggccaaagagggaggcatttggtgagtattctgcagagtctcctctgctgtgctgaggtgtggacaatgggaaaccatggacggactggagtaggcaaatgtcatattccctgttacaactgtctgtttgcatgtcagccttctagaagccccttaaggtatcaactatgtttttgttttgtcatcattcaatcctaagtgcacagaattccgggcatattacaggttccccatgaatgtttctttctttattaaaatgtatgaaaactctccagatttaaggaaggtcctcaatgtttcaaattctttttgttagatcattggtcctgtctacagctgtcacaaatttaaggactctggttatatttaatcttcacttttgaattttctgcttgaaaaatttgtattagaaaaaaaagtctatccttttatggacggctctaatctcttgaatcatttgggttggcttttctttggaccttcttcaactctgttttgtctctgttgagttaaggcttttaagaacacctgaattctttccttctgcaaaaccagaggcagcttcttttccgcctattttcagtttatttcttgtgattttagtttttttctcttaaccaaatgctaaatggatttaggagaaataaacttatttgtaaagctgtcaagggaccattagaaggatggtgcttcacagatagaatacagtttttattaatgatgcctagacaaatcctgccattagcccaagggctcagaaagttagcagcctagtagttttggagttgtcaatgaaatgaattggactggatggttaaggatgcccagaagattgaataaaattgggatttaggaggacccttgtactccaggaaattctccaagtctccacttagttatccagatcctcaaagtgaacatgaagcttcagtttcaaattgaatacattttccatccatggattggcttgttttgttcagttgagtgcttgaggttgtcttttcgacgtaacagctaaacccacggcttcctttctcgtaaaaccaaaacaaaaaggctttctattcaagtgccttctgtgtgtgcacatgtgtaatacatatctgggatcaaagctatctatataaagtccttgattctgtgtgggttcaaacacatttcaaagcttcaggatcctgaaaggttttgctctacttcctgaagacctgaacaccgctcccataaagccatggcttgccttggatttcagcggcacaaggctcagctgaacctggctaccaggacctggccctgcactctcctgttttttcttctcttcatccctgtcttctgcaaaggtgagtgagacttttggagcatgaagatggaggaggtgtttctcctacctgggtttcatttgtttcagcagtcaaaggcagtgatttatagcaaagccagaagttaaaggtaaaactccaatctggcttggctggctctgtattccagggccagcagggagcagttgggcggcagcaaataaggcaaagagatagctcagaacagagcgccaggtatttagtaggggcttcatgaatgcatgtgagttggtttagtagagagacacaggcaatttcagacccttctatgagactggaagtgatttaagagggaaaggatagccatagtcctgaatacatttgagctgggtttcaggatgagctcacaagttcctttaaaaaaaattgacttaagcaaatcctgggaagagtttttttgctatacaattcaaggttttaaggtcctcggattcatatactttataaatgaattagccagcttgtttaaaatgtagggaaattgtgggaagaatgccttctttacttaattcaaggttttaaggttctcttaatcaattctactagctaattagccaattatttaaaaataaaagtttgaaattgccaaaaaaaaaagacaaggaaaaggaaagaaagaaagccaccagtctgtttggcatacaatacttaattgttgcctgacctacgtgtgggtttcagatgcagatcctcagttttcagctcttcagagactgacaccaggtttgttacacggcttaaaatgatgagtatatccattgaatctcaaccttatctctctctagaccttcttggttaagaaaccatgtagtttgtatgaagtaggtactcaaaagatatttgatgatttaatttttactggagaagaaatattcatatatgttttcttatttttacatgttttaaatatgtaaagattaaataaacactcttagaagtatttaaatttcctaaagtaaatttatctcaaccagtaacaggaccctcccaatactggaaagttgagtgtgaccgcatttagtggtgatgagtgtgagcttgcttggggagagggcaggacatttaggatttcttaagcttagagtcaatacaataaagattattgagtgctcacttgggtgggctataatcactgctcacaggagttcatgaaccacaagtaaaagagtgaggagatatgattagctcacaaataactttaatacagagcagaaagtaatgaactactgcaatggagttatcacagtgctaaggatgctcagagggcatctctgataggcagaggtgagggttagggaaggaagctgtagtctagctagctagagctgctggaatagacatgacaatggctgctgccaaactgttttctcttctgaggacagatgtcccgtgcaagtggcttggtggaagggactagtgtctctaatatagggtgatttataagcaggaaagtgtgtcctagaaattcagaccagagtgatagattggaattggatcatgggggactcattgaatgttatttattgtatttgtttttgcgatcagtgttagtaaagtgtcaaagggattgagcagatgagtgacatcatgcaacacaagttttgagtttcacttgtcagactgactggagaggggcctggttagttacaggaaggtaatttggcatgcagccactatttttgagttgatgcaagcctctctgtatggagagctggtctcctttatcctgtgggaaaagagaacaaaggagcatgggagtgttcaagggaaggagaaataaagggcagagaggcagcggtggtgtcaggggaagcccacaggagttaacagcagggttgcctcaacctagagaggaagcgacctggtgccctcggctctgtggcttccttcatctaacaacatcttccactctacaacaatgccagggaaggcggaggctggtacagtgcatcaagacacagctactcctgggtgacagaggttcagggccagctcactaagtaggcagaagtttttgacatatactttgagagataaagcaagattctgtacctcaaccttcagaatttcccctaccactcattatagttccggagctatatagctcctatcattctatcataaccttagaataccagagaacatatcatctcatctaattatctcttactatatgtgaaaaaaatgaaggacatgggggaagtgtgacttgccccaaatcacatatttcatggtagagccaggtcttctgtttgtcatatcagtgttcttcctgccacaaccatcttgaagaatctatttctcagtaagaaaatatctttatggagagtagctggaaaacagttgagagatggaggggaggctgggggtgtggagaggggaaggggtaagtgatagattcgttgaaggggggagaaaaggccgtggggatgaagctagaaggcagaagggcttgcctgggcttggccatgaaggagcatgagttcactgagttccctttggcttttccatgctagcaatgcacgtggcccagcctgctgtggtactggccagcagccgaggcatcgccagctttgtgtgtgagtatgcatctccaggcaaagccactgaggtccgggtgacagtgcttcggcaggctgacagccaggtgactgaagtctgtgcggcaacctacatgatggggaatgagttgaccttcctagatgattccatctgcacgggcacctccagtggaaatcaagtgaacctcactatccaaggactgagggccatggacacgggactctacatctgcaaggtggagctcatgtacccaccgccatactacctgggcataggcaacggaacccagatttatgtaattggtgagcaaagccatttcactgagttgacacctgttgcattgcagtcttctatgcacaaaaacagttttgttccttaatttcaggaggtttacttttaggactgtggacattctctttaagagttctgtaccacatggtagccttgcttattgtgggtggcaaccttaatagcattctgactgtaaaataaaatgatttggggaagttggggctctcgctctggagtgctaaccatcatgacgtttgatctgtacttttgatatgatatgatgctcctggggaagtagtcccaaatagccaaacctattggtgggctacccatgcaatttaggggtggacctcaaggcctggaagctctaatgtccttttttcaccaatgttggggagtagagccctagagtttaaaactgtctcagggaggctctgctttgttttctgttgcagatccagaaccgtgcccagattctgacttcctcctctggatccttgcagcagttagttcggggttgtttttttatagctttctcctcacagctgtttctttgagcaaaatggtgagtgtggtgctgatggtgcaccatgtctgatggggatacctttagtggtatcaactggccaaaagatgatgttgagtttagtgttcttgagatgagatgaggcaataaatgaagaggaaggacagtggtaaagaacgcactagaaccgtaggcattggcatttgaggtttcagaatgactaatattttagatgaatttgtttgacattgaatgttcatgtgcttctgagcagggtttcaatttgagtaaccgttgcaataacatggggcagctgttttgctctttgtcttcatgacaactgtacttaagctaacagccctgaaacatgagattaggctgggcagaatgctgctagagaggaccacttggatggtctttattctccttctccatgtccctctccatcacctggaagtcacctctgggtgccactctggtgccttccttgtcgaagctgtagctgctcacatgacacctatccctgttatccagtttgcttgactgggacgttttgccttccccttcagccaggaagtgaaagtcccagtttttatttatcacaggtgttggtattggtggtagaagaggtagaattatggaatcaggcctcctgtcaggatttctttttgacagtccctctcagacacctctgcctaaggccagctttgccattacaaactctcccttctccctctctcccttcttctcttcctcttccttcttctcgctctttctctctctctctttctccctctctgtctcttatacacatacacaaagatatactctattccaacatcctctacccaacctgacagagatgtcctttgctgtaggttcagcagtggggatgagaaatacagctctcaaacaggataactaaagcttattatcttatcaagcttgttcccttgcagacaagattgatcaattatcataggctttctgggtgttctttctgaagctttctcaaagtctctttctcctatcttccattcaaggcaaatgattgccatttaacatcaaaatcacagttatttatctaaaataaattttaatagctgaatcaagaaaatctcctgaggtttataattctgtatgctgtgaacattcatttttaaccagctagggacccaatatgtgttgagttctattatggttagaagtggcttccgtattcctcagtagtaattactgtttctttttgtgtttgacagctaaagaaaagaagccctcttacaacaggggtctatgtgaaaatgcccccaacagagccagaatgtgaaaagcaatttcagccttattttattcccatcaattgagaaaccattatgaagaagagagtccatatttcaatttccaagagctgaggcaattctaacttttttgctatccagctatttttatttgtttgtgcatttggggggaattcatctctctttaatataaagttggatgcggaacccaaattacgtgtactacaatttaaagcaaaggagtagaaagacagagctgggatgtttctgtcacatcagctccactttcagtgaaagcatcacttgggattaatatggggatgcagcattatgatgtgggtcaaggaattaagttagggaatggcacagcccaaagaaggaaaaggcagggagcgagggagaagactatattgtacacaccttatatttacgtatgagacgtttatagccgaaatgatcttttcaagttaaattttatgccttttatttcttaaacaaatgtatgattacatcaaggcttcaaaaatactcacatggctatgttttagccagtgatgctaaaggttgtattgcatatatacatatatatatatatatatatatatatatatatatatatatatatatatatatatattttaatttgatagtattgtgcatagagccacgtatgtttttgtgtatttgttaatggtttgaatataaacactatatggcagtgtctttccaccttgggtcccagggaagttttgtggaggagctcaggacactaatacaccaggtagaacacaaggtcatttgctaactagcttggaaactggatgaggtcatagcagtgcttgattgcgtggaattgtgctgagttggtgttgacatgtgctttggggcttttacaccagttcctttcaatggtttgcaaggaagccacagctggtggtatctgagttgacttgacagaacactgtcttgaagacaatggcttactccaggagacccacaggtatgaccttctaggaagctccagttcgatgggcccaattcttacaaacatgtggttaatgccatggacagaagaaggcagcaggtggcagaatggggtgcatgaaggtttctgaaaattaacactgcttgtgtttttaactcaatattttccatgaaaatgcaacaacatgtataatatttttaattaaataaaaatctgtggtggtcgttttccggagttgtctttatcatccttgcatttgaatattgtgttcaaatttttgattgattcattcagtatctggtggagtctccaatattagaaatactggaaacaaactgaaaaaccacaaaaggacaaataatgcttcatgagtcagctttgcaccagccattacctgcaagtcattcttggaaggtatccatcctctttccttttgatttcttcaccactatttgggatataacgtgggttaacacagacatagcagtcctttataaatcaattggcatgctgtttaacacaggttcttcacctcccctttcttaccgcctgctttctcagctcaactatcacaggcattacagttgtcatggcaaccccaatgttggcaaccacgtcccttgcagccattttgatctgccttcctgaaatatagagcttttccctgtggcttccaaatgaactattttgcaaatgtggggaaaacacacacctgtggtcctatgttgctatcagctggcacacctaggcctggcacactaagccctctgtgattcttgcttaaccaatgtatagtctcagcacatttggtttccacttaaggtttcctatttttgacctccacatcctgttattgtcttttgcagtgattctcagtgtggtcagggaccacctgtaactgaatccactgggtcacttactaaaaacaccaattcacacttattcccagatgcgttgaatcagaatctttgagtggtggggccaggagtttgtatttccaaaaatcttcccagtgcttcttatacccatcaagttttgagaatcactgcttaggcaactctgtctgtgtctcttcctctgtctctcccccttgctcattctcttgcttgctcttgctctctttctctctttcttgccccagcaagtgctaacaaacacacaagacagcacatagtaagcatttcaaaaggggttgttaaaaaaaaacgaataggtctttcaaagtaaggtaatgattattacctagaatgagctccttttctgtggaagactgtgcttcttgctctctaggcctttggatggtagccatgaagaaaaacaccaatcaggagcctcagtggatagtatatcatttccactcctctaaacatctttagagagattactctttttcatagttgatgggcagatctgagtgacagagagtgccttacacaagtgatgccctccaggtacctttcagacacccttagataatggactactttatataagcttaatatttcctctgctattgcctaaaattctaccatttgttgttcactgagataagacttgccctcttcattcagtctcaatcttataaaaataaaataccctttagctcaaaaaagcttcccctatggcagaagaattgtacaagaaagactatgacccggggttccgctgaaaggggagaaagcaaatatgagggtaagggagtgcatctgggcaccaaatgaaagcctcttctaattcccatgtcatttatgagagaagattctatgtctgtagtactcagagaggtgaactgcccccaaatcagaggaccaactgtcacatgggattccaaccttcatcatcatctccatttctgggatcagggtcctggggcagctccaagcccaaataatccatgaacccaaaaggggcttggcctaccatgcagggggagcctgggcgttgcaaccctcctccttggaaccacttgtcacaggcaagactgtggatgacaagggagccggatagagtggccaggggctccagagtcagttcctcctccaacatggctcctagcacacgcctctgctcatgtctcttcttcagcatggtactcgcattcctgctacttcccatttcttcatttctcacctccaaatattataatccttcattgtcacacccatcaagactaatcccaaattttgcctccaccgtcagatttgctgacactttaagctcgtggatttctcctcttttgtttcatagctatacttggtttcacctctaataatttcaagcatgcatgtcttttctacctagttagatcaggaacttctccaagacagggataatcacaactttaggcacacagtagatgctccaataaatgaattgaggagttggggaactaggacatccaggaccgttttccatacagaacccatctgtgttttcttaggcagtcccagcttaatctctttcccatttgatcatcagaactttgtgcaggtctactcatcttttggcttaaaccttaaagactctggactgtgagttccagctgcctactctgtcccactcattctactttgatcttaatccagtcttacttccaatctttttctttctttgttgaattcttatttttattctttttctcttttgaattgttggttgttgctaaaattgactatatttttatacccagtctgagccttcttccgtatccacagttaatagttcattcaacttagttgggactgagctcgtgaaacattgatgtcactgtgttgttaactggagcaaagccagttgagaagttcaagactttataaatttagttattcttttgggagttctcaaagcaaaggagaacatggctttctccggaaagttattcccattgccttacttgttgtttgcacctggttagagccatgactcaggctccttagaaaccttgttttatttcatatatatatattttttctcatctcaggtcaattttttctgttcagtccagaaacatgacacaccctattggtaaaaagggaggaaaatttattctttcctcttttatgtttccttggctacatgctgggataggggctcatggtaagtttgccagattcaaccaaaaaacgccacaaaaacaagaaaacaggatgccctgtattttatctgacaacgctatcagcaggaaagcttatgcttctaatgcagtgtgaataaaaagtgtactagaggctgggtgcagtggctcacacctgtaatcccagcactttaagagctgaggtggacaaatcacttgaggtcaggagtttgagaccagcctggccaacatggtgaaaccctgtgtctactaaaaatatgaaaattagccgggtatggtggcaggtgcctgtagtcccagctattcgggaggctgaggcaggagaatcgcttgaaccgggaggcagaggttgcagtgagcaagatcacgccactgtactccagcctgggtgacagggcaaggctccatctcagaaaaaaaaaaaagaaaaagaaaaagaaaagaaaagtgtactagagacccctcttcagaagtttctgagcaagaacaacttgagactgtgaccactgttccaactgtaacacaatctcctgttctcacttccaggcacatgtgggattgatgctatgtcactggaagctaatgagacctgcagaagaggtagctatttctcttctaagcaattttcttagaggaagttaacccatcctgctgcatattgcaaggaacttgacattcagacccttcttggaaatctgctttcatgggcacactctatgttcttgcatttatttcgtacaataatcatctgaagcatttggaaaaagtgcagattgaagttcctctgaaccagaacttctcacttataaggtctgaggcagggcctggggattttaattcttcagagagcctttaggccatagttcataagctctgatctaactcaggattctaccatcatagatgattagcaaaggatattggaaatgatcctcagattttagaagaacataaggctcggagactttagggaccttgtccaaggtcctatggcgaggcaggacttgaactaggctaagaagtcagatctccaggttttcacatcagggctctgcagagggtggcactgtgcacctttctgaccaggggctgtcctttccaggctgcttctaggacgtccctgctaccactccaggccacccacagaaaacccacttttccatccatctccatcccaagtactcctgttacatctcggtgtgattatcaccactgttgctgctccaatgttggcttcatcttttctctttctcctgtacccttccagaggacttaggagaagcatctcaggtgacccagcctgttcttagcaatcctacagaaaaatgctgcaggcggacaacacaaagcaaaacgctgccaataaacagtctgtcagcaaagccggcagtacactgagaaagctcctattgccactggaagtcgtggaacaacccattgagatgatacatgctcttttaatcacacacagtcaagttactatagcaactaacagtgtttcagaaacatggtattaatcacacaaagtaatactatctatttggacaaaaagaagcagcttcctctgagaggaattgtaagaaatatatttcaggggatgatcgcaaattttagaagataacacagatgacttctcatgagcagcactttcctgaaggacatcatcacctttttcttcctgcttgtcattttcttcctgcttccaccttgtcatgttagccgtgcagcatgcatcccactggtagcttttctcttcaccttgctgaaaatgagtttttctggccaggtgcggtggctcatgcctgtaatcccagcactttgggaggcccaggcgggcggacctcttgaggtcaggagttcgagaccagcctggccaacatggtgaaaccctgtctctactaaaaaaaaaaaaaaaaaaaaaaaaaaaaattacctgggtgtggtggtgggctcctgtaatccccgctactcgggtggctgaggcaggagaattgcttgaacctgggaggcagaggttgcagtgagccaagatcatgccactgcactcccacctgggcaacagagtgagactctgtctccttctttgtagttagcgtgcaactcaaacatagtctctactctcctgtgagcacctttttgcccctggcattatggtaaaccatagcagtatgttaaggacaggaaatatggatttgtaaatgaagactagccttgtattcctttcctattgaggaagctgattcactaagatatagttcatgaattccttgtcctgaatgaagagggaaaggaaaccaacttatgaagcctcaaatactgcacaaatggatgtacattagctaaagcaattcccacagtaactctgtggaagaggttctgccatcatctccattttataaacgaggaaattaagttccgaaaggtttaattacttgcccaaagccaaacagctagtaagttgcagaatcaggattaggacacatgtttaattccaaagaccatgttcttttcgaatgaccatatctgacttctgggggttactggcaaaaggaaaagagcaaaatggaaggtgaatggggattgaagtattggagaagtaatgcatgtattacaggggttacaaatgggtgttgatatatcagccaatgtttttttggacaaatattttaaaaagctttctgaaggtgcttattttgagattgtcaccagcagcagctctctcctgtaaccagagaggaaaacaggaagttgaagacattcaaagatggaccactggctccaatccacagttttagcagtaactagctgctttcccatttactggcgctgaagtcagcgctgcaatattgctggcttgcatgcctttctggccctaaggtatcataggttctctcacactgatgcttggctcagagatgggggaaaatggaaatcattaacacagccagtgagaagctctgatcttcatgacacctgcagcacgctccttgcgaagagggtgattctccatttgaaacaggctagagatacaggacataatgaacaatggaagtcagtgggagctaccttgcattcatatttgtgaactttggaatggggctagtttctaaaagggtaataaccagcctggagcagaagctgagggtggggcgtcgggggtgaagaggagggagggtctctgagttcaggctgagggatgctgggaaaaggcaatgactccctttgaggaaaaaaaatagagggcaaaagcagactccagggcctgaagatgcccccaaatggcaaattaagtgaactggtatacggtgaaaaaagttatagagctgggtccaatgccacaggccacatagaagattgagagaggctctaggcagaagcagggagctggtcagccgagattgtgatggaggtagctatgcataagtaatttctaccagaagttgaagtgtaggaatatctggggtcaaagcaaaaaaagactttccctgctgggaatggaagttaaaagtaatgattccactctgaatcgctgggggtggaggcaggtgtgtgtgtggtgtgtgtgtggtgtgtgtgtgggcaccaagcaggggtgaaagctgattatggaggggtggtgtcaggaaacatcacaaaggaacccctgagtgctttaggcctaggcggagctgcgtagcatggactgcacttgtgccaattcgagtgttgatagtgtttgtaatttgtgcctgagaagacatgattcaaggatggcatgaaagttgtgtgtaaggtgtgaagggctgtcacatgaaaaatagattagattttctttgtgggcttcctggagcactcagcgctggtgttccacagaagcacatgacgaaagagggggttggtattatttttcttcctgttttaggcttggattcagagtcagagagagggcattggaccctgtcgtactgcagactggccagaggcaggcctgttggatcctcactaacagcagctggtgggtaaaggaaggcatcagaggacctagttgggcaggggcctggggaagtagacctgcttgaatgactagctcctgctggcctagctcctcctacggcctgcctctgagacttgttacgggttcaggctccattcaggcaggcgtcactgtgcacagagatctaccttagcaggagggtgccacagcaggaaaggatgtggcaggaaatgcccaaagccagatagacgttgaccttctggtgggtcaatcagttcacattaggatacctgccaacatttggaagtacagagaataggatcccacacttatggggaggctaggcagggtatcatggagaattggaatgctgggccagtaaactgaggccaacaactagttaaaccccataaactggggaggactacctcttggagactgagatggttaatactgagtgtcaacttgattggattgaaggatacaaagtgttgatcctgggcgtgtctgtgagggtgttgccaaaggagattaacatttgagtcagtgtactgggaaaggcagacccacccttaatctgggtaggcacaatctaatcagctgccagcatggcagaaaaatgtgaaaagagagactggcctagcctcccagcctacatctttttcccgtgctggctgctccctgtcctcctacatcggacttgaagttcttcagttttggaactcaggctggctctctttgctcctcagcctgtagatggcctattgtgggacattttgatcatgcgggttaatacttaataaacacccctttatatctatctatctatctatctatctatctatctatctatctatcccattcgttctgtccctctagagaaccctgactaatacagagacgttgcctagagatattgccataggctgggtcactgatcccggttgtgtcctaaaaattcttttcaatgcagttctctagggaaccatggatcatcatcacagttggcactcaagatgtcattgagaatctagagattttaagctacttcctgccttttctaagacccagctcacatgtcccctcttctgtaaagccttcctaaaccctcatacatggttactctcacttcatttggtcctttaatcatttggctcttatcactctgcggtatcaacctttgtttatgaccttgtcgcttctcgagattgagctcacggtgggcaatgagagagtgcttaccatatttgtctacccaaacctttaaagaggaagatattatttctatttttgtcaaataatttgccccagatctcatcgtagtaagtggtagaaatggatttgaattcaagtcagtctaatttcaaactctgtgctcttttccttaaatcttgcactcaatgttgtacccttcagcacattggcatgagctcaggtggcaggagaacaaagctgcatttttgagcatagacagacgtagaaggaatttcgtggctgctctagaagtaaagttctcctgctataccctcagaaatttccatcttctaggctgcatgcagtggcttatgcctgtaatcccagcaatttgggagaccaaggcaggaagactgcttgagctcaggacattaagaccaacctgggcaacacggcgaaaccctgtctccatgaaaaatacaaaaattagctaggtgtgggggcatgcgccagcaactcgggaggctgaggtgggaggatctcttgagcccaggaggttggggctgcagtgagccatgactgtgctactgcactccagtctgggtgacagagtgagaccctgtctcagaaaaataaaaaaattccatcttctgtggtgcattatatacactgggatcaaactggtcttgatgaatctgacttttgacaaccatcctaacactattggctttattcagttgcagctgaactatttctgtctaacttggctgcctaacctacaaactgtttcaaatcagatgtcttttttgtctagtgaaactgagagaattattttataatcacgctctctggaaaaaaaaatagtgaatggaaatttttaataaaaaagaatgtggtagaaacagaattttaagttactaattggaaaacatgtggcaaaatctttatccactggcctacagtattccgcggccatctgtggaaatttataggtattaaattagatacgggctggtttttgtgtttgtagaacgtaacagaaacctaattgaaaaccacatagcaacatcataaaaccaaatgcgatctctattcctttcagtgtcaaaatgcatacacatgtgaagacaattactttggtccttaaacaaaaagacctccattaatatttttattaaatactgcacatttctaagagggagatagttaagaaagtaaatgtaagcatctgtctcagagtctaaattatattcaagagtgattgtaataaggacaaatgtttagcatacaaggttagtcttactttgcttatattctgctgtttgaatgttttcctgtgcatagatttacaagtctatgtttttgtttgtttgtttgtctgtttgtttttgagacaaagtcttgctctgtcgcccaggctggagtgcaacctccacttcccgggttcaagtgatgctcttgcctcagcctcccaagtagctgggattagaggagtgtgccaccacaccaggataatttttgtacgccaggataatttttgtatttttggtagagatgggttttcagcatgttggcaaggttgctctcaaactgatcactgacctcaagtgatctgcctgcctcagcctcccaaagtgctgggattacggatgtgagccaccatgcccaacttatgtttagttatttaaaaattactggtcactggccttcccgcagaatctagaaaatgagagcagaagagttgcttcatttgacaaaagagcgtataatatttcctgggctgagggaaggaggctgggcgaggtgaccctctgggatcctgttggatgaggtaccagatctgtgaattggaactctgtccctgagaacacttctgtgaagccctgcaaagacaattgtcaagggcaagggaactagtaatccttccctggagaactaggagtcctgggttctgctcttggctctgccccagcaggtctgccattgcctggtgctgtttctggattaggcgctgtttaataatcacctttgtctcttcccggattgctccagcccaagctgaactccccactccggactcattcgcatgctgtcttgtaatgatgcaaattgtgattgtttaactctgacaattaagtttttgtgcattaatggtactatctccctaaatatctaatgaattccccaagggacttttttactttagagaggcagtgtagagtagtggtgaaagcatggcctttcagcaaaaggattagggcctaaccttctcaatgcactatgcctcagtttcctcatctgtaaaatgaggttgcaggttaaatgagttactatatatgaagtgcttagaatgggcctgacacagggtaaatactatataatattgatatatgtggtaagtatattactatagtatatttttattatttctttttgacccctcatagtatttggttcagtgcttggcatagggttgttctacgtttttcctacttgcctgcatttcttttaccttttctttattttcccgtcagtaaatatttgttaggcaaataagagcctttgtaatgagatggatcctggtgaaaatggaggctaggtggttgaattcactatatctgttggttgttctccctttgctcctctaaattgattctctatccctgctcagttctatgcctgggggagctgacctaaatgggccacatcccctgccagccctgccctgtggaaatccacccccagaagacacagcaggagatgagagagtgggcagaagagtggttgggatatttcttccattcatctctgctttgacacagcatccagggctgtagttgtgtcctttcttgattacatcttgagtggtccggcggcccctcctatcttcctgccctcactgggctttggtggttgttttcccgtttcgtcttagaccttgtagaagtaggagtttctgctggtgcaggttgctggggtgggggtggaggggggtctcagcatccactgttttgccttaatcctgtccactcctctataagcagttttttaaattcatatttcatcagtcaaattatctgagacgaattccattttgtgccgaaatcttaaccaagacattacatattcctggaaatgtccttttatgcctctgggtctccatttcctcctctagagcagaagggggttggtcagaatcactgtctccaaggttttttctaggtctgagaggctactgggctatcattagaatttagagtgactttatgataaactgcagaggttttcagttacgaacaaggtgaattccaatcaagaacaagtgtagagaagtgggctttgtgaagaaaagcaaattacagaaataccaggtaataaacgcctgactgtgtgcaagtgcatcagcaaaagacccaggcatgagtaagcagtgtgtgatgttgcttggagggggtacatctgggtatactaagcaaggtgtgatctgtgggaagtacaaggcaatcccctggaaacgcttgtcactgtgcacaccaggcctggatgctgcgatttgattcagctcagtaacttagaaggcgtgaatttaagaaaaaagaaacctaaagttagattggaattggaaaatggcctttagaaaggtcaatttcttctttccttcctcctctctcctttcgttaagagcctgaaaacagaattaagcagtcctcattcatatgagggaacatctcaagtccctgtgtcttggaaatgaactatgttgagcaagttgcattttagttaatcatacatgtaatcgtggacataaattacaatgatcagtaatttgtatattgttaatgggtttgtcactggcagtattgagggttcttgaaaatattttcttttcagtttgcccattttttccactgtgatggcttagacactgaggaatgactggcatagaacaggttttcattgaatatctctagtggaaagagtacctgattagttagaagatggccatttgaatagctgttccattttttgatgttaaactctttcaattgcttgtaggtaataaaggcctgagtatagcgcttatttctaaggcatgccttttaaagtggctatgttggtttcacaagaagaaattgtaaaagtaacaaggtctggagaagaaagatatctggctagcaaataaaaatggctagctctgtgtcccagccccatcaccaattaattgccagtttcatgcaagttatttaatcccctgggtttgaattttctcactatcctccatttgaggaacacatttctgttttaaaagcatgttcatgtgtagtgctgaaatgtagtagtcaaaggaaatggtagtttctttggccatcataactgtcctagaactatgtagtgccaggctgatcaggatttatagataagagggtcaaggcttagggatgttaattaactttgttaagaaatagagttgtattagggtgttcttactcactcaatctattttcagcttcattttattgtgatagtatctctgtgatatatttagtaaggaacataaatgttaatagaattattgacctgtaagttttgaaatgagcaagtaaaattattcaacacagcctgtgttcctaggtctttcttgctagaatgttaatttttattgctgaatgaaaggcaagtcatttgattttgtaatagatgcccttccttccccactccacacaaaccgcagagctttgctctctggaaagaactcaatatataagctccacaacaagtaagacttgagatggcacacttggaacagtcagaatgagtttggtgaggtatgctaatcaagagaggaaaggagcacaattcatttctgaattggttatcaaattcttcttgtaagtgacacgattgaaactgtcaattggctttgcaacctgctgagtccatatttctacatctgtgaaagctcagcaaatgagaccttctcagcaaaggaagagagtttcaccagcaagaaatttcatgaggtgtcgcaccctgtggccaaccatttctcaagagacctgtttctgtttcacctatcaaattaccttatgattgacaggcagcttcactcattactcagatttcctatctccttggcaaatctggtcaccacaatactctttaaaaaacacgctcatgttattagtatgaaaacattcaacactagagcttgttgggactcaaagagtcccctttcccaagagcggccattcagttttcccatgttgaacccttatcaggtaggcccaaggacccttctcttcatccctgttgaaatattttacaaaagattcttctcaattgcattctatgctgccattcaaaatcacaggctatccgcactacaaaatgatgccttaaatcagatgctgtactaaaaattataaccaagaagctccatttaagtggcagggtttatttagccatttttagcgttgtaagatggacagaggcatttctctgtcttccataagggaagaggcatctcatggaggcctatcagtgtttgagcaatgtagagttgaagctcatccacttacattcaaccttgagatagtcttctctttgaagtcttcttctataaaatctctatagatgtcttcttctataaagatgttttgaagagtatgatgtgtttaatatatgtgtaggtggcaaagatcattgagaaaaaaatgatatgtgtttagtttttttcttttgggtgttttctttccttccagacattatgtctgtttcaaacacacactcctagtagcagaatagctacagctacatgaataaacacattgtccagctgaaagaacactattcagactgctgaaaacagagccaagttaaacaataggtgcatagaaagggtagaatggcattttgccacttaatgaattataagaaacagatgtaagttgtttaaaaggacacatagcctgaatgtggtccatttatcacaaatttgcagaaggacttagattcatgatttagggaatagtcactaactgatttgtgtatatacatgtatttgatgatcctgtcatatgatttcatggcttttcttatgcaaagacccacttattattggaggtacttaatgcttttgctggactggggttgagaaaattgaaaatttcattatcatccacttcttaccaccacagtacacataacattattctccttgcctgggatttcctaactattttcttagaacatggtggagtgggggctgcttgtacattagagacgattattaataattataaactccctgaggtcaagtctctgccttatgttctgctgtatctcctacagtatgtagcaaagtgccaacagagcaagcacttcaatatgctttaataataacatgttgcacaaccatattcttagtaacatcttcccctgaagaagcttgcacagaatctgatcatctacctccacatagccatcaagtaatggcaggtttgggactgggaagcacagagaaaaagcaaaggcatgagatgttgtgataagtaagagaagaaccaagacaggctagtaaagtgaggaatgttgaaaggaataagcaaggggagatcacttggtaatttgtggctgttcaagaagaggtcagaataaagcaaatgattatagccctgaaggactgtatttagtgcaaggcctgagcaagaaggtgaacttttctgaaactgtaagtggggtgggtggctcccagagtttgccctgtccaagtaattcaggggaaaacgatggtgggctcaccagactaaaagaagacatggacaaaatacatgtaattagcttactggctctagaatagtcatgatatatccattaaaaatgacatttctggctgagcatggtggctcatgcctataatctcagcactttgggaggtcaagatgggaggatagctggaggccagaagtttgcgaacagcctgtgcaacatagtgaaacaccatcgctatgggaaaaaaaaaattagctgggaatcatggcacatgcctgtagtcccagctacttgggaagctgaggtgggagaatggcataaccccaggaagtcgagacttcagtgagccatgtttgagccactgcacattagcctggtgacacagaaagaccctatctcaaaaaaagggacatttctataatttggcaaggggtatgtgtgtgtgtgcataagaaaagaccttcagagtctccaggaataataattacaaacatttagtgcttgatatgcactcaaactgtcttaaacccttaaaatagaattttaatctgtcttcataagaatattatgaggtggaaacgattattaccttcacttgtaagatgaaaaaattaaggcacagaatgattaaataatttgcctattattgccttagcctgttttatgctggtgtagcagaatatttgagactgagtaatttataatgaacagaaatctattggctcacaattcggaagactaagaagtccaagatagaaggaccggtatctggtgaggaccttcttactgtgtcctgtcatggtggaaggacaaagatagggcaagagagcaagaaagacccaaacccacttttataccaaacccactcttgtgataacaaacccactcctgttctaatgacagagccctcatgacctaatcatgtcttaaaggtcctacctctcaatactgctgcatgttaagtttccaacacgtgaacacattcaaaccacaggaactgccaactggctaagaagaagaagagctaggtaggctggttccatggtggaagtgattctagggatagtcagataaacatattgggcaagagaaaaaggtatggaaggattttttctttttctttttttttttttttcaaatcaagttcagaactggggataggtctcacacagacagctaagacttgtgtgactctctaaccattctgggaaaggggaatatttcagagacaggacaatttaatttcaagtgacttaactaagcttgtggaagagtatctaggctgggtagcctgagagcatttctatcctcgccccataatatatctgcatgtttctaacttgttagaaaaccttgggttcacagctcctccttttctagttgctgtctttgaaaaatagaaacatgagattcttattagtcatttaatgtctgcagagcccttgaaattctactaggagtgcatagtaaaaattgatctcactcctttactctttttgctttgtgtttaatgtatataataaccagtaaagttatctattcagtttactaaatataggtagaatttgaaacatcagaaaggaaggaattcccgtaagacatgaggattgacactgaagtaagctccaatatcataattcttccatttgtaattgagtagtgaaatcatatctctttcctgtgttcttgctttatatcccaaatcttaagccccattaaaaatattttttaagagaaagagacaaaacaggatttgtaggtgggtagtgacttagtacttttaagcagtggctactaacaatctgaaatgtgaaactatctcactttcacacaagaagagatgtagaagattttatttgaagtgtgtcttagcagggaggagagagacctcacagcaacagacaggatccaatatggctgcttctctgatggagtccaatgccttctctaggtttatcctgaacttccagtagggaggtggttattattcagctatttctcaatgtaatacctccccttctgaattatcaaaaggcagaggtttaggaatatttttagcaacatgaactattatatgaaaaaataattgaagacctagggctgttgaaaggctcttttcaatttcagttaacacccaggcatgcctgattacagcacagctgccaaggcaaacttctcgcttcaaaacatggcatcccagatttcacagtggtcctagggcttcaagactgttaacacctttacagtccttgtaaaatcacatatagcagctgtctgccttccagggtaaactctctgatgaagaggattgaactttttcaggctatatctttggagtgatccaaggagatagatctggaagaagttattattaagggcccactcttagttcacattttactgatttgagtagtttctatctttctgtattcaaactagcacattaaaataaaggaagagagttgttttagtgcttcatcaagtattttggtcattcagcaaccaaccagccagcagtgttcagaaaggctgctatatgccatgcattgctctaggtgcttcatggatacctaacttgcaaggaatacttagtgaacaaccactggattccctcatattttggagtaaattccaactggagttgctcatgccaagtaatgccaatacaacaccctatggatgtagagcagacatgagtcttagggaggaattatgcatttaacaattttcttcattttagtaactcagcttgaggtttgaatttctgactgcaagcttcattctgctaggttagtggaaagaaaccttaacctcagtcctttctggggtttccccatgtctccccaggattgtgtcacactctggatcttgtgcaatgtcaagacactggggtagggtgctggtcaggtcctctcatgcctgtctgcttacattgtttctctcttcgccactcttcaggaatggtgactctcagctattcctgtgctccgcttggggccaggagatcttgggtgaggtgtctctggttctgttggtctgtgtgcaccctatagccaattcacttctttctctgaggtcttgctctcttctaggtggtgaccctagggattgagatataggtcctctctgctccttgacctacctctctctccctctgacctcaggaggagtctttttagggcctgagggaaattattctctgttcaggtttctttgagagacttccttatcctggagacttttgttaaacaaatggctgaaagactagtgagggtatttgaacctttttctctgacacattcttcccatgagccaatgaagaatagaggcaagttatgagaacatggcagggatggtgacagggaagtgaaaagaaactatttcaaataactatttcaaaatattaaccctcaacaaccgtaatggatataaacgcatgtgctcatcaaaatggcagcaaggggagacggtcaaaggaattagaaggaagggtgaatccgactcatatgggactgagagggtctctggtgtgtcaggacatagctgtgcgtcctcagtggtgcctcctgaagattgcatggcatacaagtgtgcagctcttataaatgactggttgggattgaatggccccagggtagagtgggcaatgatcaaatgtcctgtggagcagttggaatgtagactatttgtgagggcgggggaaggggtattagaagaaagagataaagtttctccacaagaatgtcttctactttgtaaaagtagaaccactgactctggatattggttttaggaaagattgtcagagcatagagtcccaccatctcattttttttttttaatgagacggagtttctttcttgttacccaggctggagtgccatggcgcaatctcagctcactgcgacctccacctcccgggttcaagtgattctcctgcctcagcctcctgagtagctgggattataggcatgcaccaccacacctggctagtttttgtatttttagtagagacggggtttcaccattttggccaggctggtctcaaactcttgacctcaggtgatccaccctcctcggcctcccaaagtgctgggattcaggcatgagtgaccgcgcctggcccatctcattttttaaaggacagaaagatgaaatgctttgcctcaaattgtctagtccatggtgagagtggagctaaacccattttgggggtccctgtcccttgtgctctctaggatgttctgtatactgcaaacatatttagcaatttggttattttaagaataagaacaaactgaaaaagatcatctttatcgatgctaatacattaacatattttttttgtttgtttttgcaacagggtcttgctctgttgcccagtctggagtacagtggcatgatctaggctcattgtaacctctaccttctgggttcaattgattctcatgcctcagcctcctcagtagctggaattacaggagtgcaccaccacacctggctaatttttgtatttttagtagagatggggttttgccatattggccaggctggtcttgaactcctggcctcaagtgatctgcctgccttggcctcccaaagtgctgggattacaggcatgagccaccgtgactggcccactgacaaattttaacaggtttcaaagacaaaaaccctttgtctatgtaactattccctggcagtttatttcctagatgtcatctaaggacttggattgcacaaagtgaatcaccattgtgttctcagactcagaagctcaggccagctgcatggccagatggcccagtggccccacagaccctatccttctggcttgagagaaagagaagcaaagcagagagagagagagagaaaaattatagccagtggctgctgcaaatccagctgttgatcctattccagacatgagcacaatgatcatctggctgccaaaagaataacacatattctagccagggagaactgccaaggatctgatgagggtttgcttccatacatgtgtattgtctcatgagcatccagaagatggatgaagctcagtttactttttttcttcagtattatttgaagaatacattttgtgattttgttacgccttttgctactccaagtgtgatttgtggacgagcggcatcagtgtcactcacagcaggttagaactgcagaatcttgggacccacttcaaacccagtgactcagcttctgcattttaacaagatccctgggcgattcgcatgcaccttacggtggagaagcagagtggaaagcacaccatgacaggtcataggactgggccaataggaattggttggaaaactcagtggtggccagcattgagtgatggcaagaagaccagactgagataggagacctgggttctagacccaattctaccacttccgtctgtctgaccctgggaaatcactccctgtcttgaagcactgatttcctcatctttaaaatgggaaaaatatctgacttgcttattgcagggctgtggtaaggatcaaatgagatacttcatcagcaaaatgatctgtgagatataatgcacttttcaaatgcaaggggctgacaattgtcattgttcagatctacctaaaatggaatttgggctttttgacttgtgaaatgagtcactgaaccattctaagttaactatgaagaatatgtacgtgacatgcaagagcaggaaacacctctgagccactttcctcagagatgagcacaggattctaattttacaaatggatacagggaggccctatttatgaagttagcagtggttccccacctgagttgttcattacaactacctggggaatcttctcaaaaatacccttgcttaggggtgggtacaggggctcacacctgtaattccagcactttgagagtctgaagcagaggcttgcttgagcccaggagttcaagactagcctgggcaagaaagtgagacccatctctacaaaaaagttagaaattagctgggtgtagtggtgcgcacctgtagtcccagctactcgggagtctgaggcaggaggattgcttgagcctgggagttccagggtgcaatgagctataattgcatcattgcactcttgtctgggtgacagagtgagaccctgtctgaaaacacacacacacacacacacacacacacacacacacacatccccacaacaacaacacaaaaaactgctgcttgggtcccaacatagaccagttatagaccaattgaattagaaccaccagtgctgggacataaacgttattttttaaaaactccccagttgattctaatgtgcagctagagttgaccattgcagataaagcgctacatcagaacgagtttctaggtacaattgaacccttcttctcgttgccaactgtgggataaaattaggaaagggaaacacttctgctttcccccttcatgtttcaagaatccctcttaaggtaattcattagaatttagaatttgaacttggtgagtgtttcttctttgccctgttcgtctggctgatgaacttggtgaattttaaagcaaataataagccggttgtggtgacatgtgcctgtagtcccagctacttgggaggctgaggcaggtggattgcttgagcccaggagtttgaggctacagtgagctataattgtgccactgcactacagcctgggtgacagaataagattctgtctctaaaaaaaaaaaaaataataaaagaagataataatgagcactaggaactctgagcacaaggacttctttaagtattctattatgatgtgatttggtggagtgaggcattacagttccagtttcctaggctttacaaatgggacctatcaaaagagggatgcagagaataaggaatgaacacttggattcaggggaaacccaagaaaaaaaaatttattggttaggggaagtctgatgacagtgagccaggaaagaaaactcaggtacttgagtactcaggtgcttcaaggttattcagaaaaaaaaaagagagagagaaaacagaaaaaagaataaaaagcctttttatgtttttctatctttttttctctctttcctctctgctttctgaatgctgaaggaaagtattatggtcactggtaaaaacaaacattctgacatatgcacacgtatgtttattgcagcactatttacaatagcaaagacttggaaccaacccaaatgctcatcaatgatagactggataaagaaaatatggcacgtatacaccatggaatactatgcagccataaaaagaatgagttcatgtcctttgcagggacatagatgaagctggagtccatcattctcagcaaactaacacaggaacagaaaaccaaccaccacatgttctcactcataagtgggagctgaacaatgagaacacatggacacagggaggggaacatcacacactgaggccttttggggggacaaagggagggagagcactagaacaaacacctaatgcatgtggggcttaaaacttagatgataagttgataggtgcagcaaaccaccatggcacatgtatatctatataacaaacctgcatattttgcacatgtatcccagaactttctgcacatgtatccccgaacttaaagtaaaaaaaaaaaaaaaaaaaaagacaaacactctgaaatcagaaggacaggcttacctcccagccaggcttctaaattgccgtcacccactttgctttatttctatgagtcccaccttcttttcttataaaaaggatagaaagaagattagtgtatctgttactcaatattgctgtgaggtttcagtatctttgggcttagcaatttaaagaattttaagcggttgtggcacaaaagtttttttcctcatatagtatctgtgcaatcatgcctccaaattctgtaatatttaattcttcttggaaaaaaaaacaacaacaaaccaaacccccaaaacaaaaaccttattctctgaggttaaaatctatagtatatctagtttcatgtaataatctggcttggaaaacaatcagccaagcttcctaatctccctttccattatctcctttccttagggcctatggcttggtcctggtggtccctagaggcgtgtgccagttatggaggtggagagaaggtactccagaggaaggagcttgagaaaggaagcctgttgagctgatcataattcagttccctgatgatggcctggacagtaagcagatatagaacatttttagaatttttgtctctttcatttgatttatagcccaattccacatattttgctctcaatctttctactccttgccccagttctgaagggggtcaacaaaaaagatgccatttttgtgaccttgagaatcagatcctgtttctcctttctttaacctggcagacgatgaagggataaattctcaggtaggatgggggtcatttgcacgctgtaggaaggtttccaggtggtaggaagagggttgccagcttagatggatgtaaccagatttgatctaccaagaatgatggtgattaactgacttctctttaattttttaaaaaacaggatattgctgcccagatatgttacacttgtggtattttggggtattctccctgatattggtgccagcatgagccatagaatcacattctccaatagtagctaagcctccttcctgcctctgattggactttctgggctctgtaatcctgttgatggcctgaaaatgtactaaatatgcagccagggcaaagaaattgcaaaacgtgctttacctaaaaataattatgttttttcccctcaaaggtccagagaaaatgttatttaagtcaatgaatacagccatcattttcatggggcctctcttaatttccttctttctttttttttttaatttcttgaaatagttagttccttatctgtctttcacttcccattagaaagtgctgacattctgattttctgtaatcttattactctatgtgacttctatagagctctttcttattttttcttcctgttatttttacttttgaacatttacagggtgttagctgtcaatgacaatgaaccccaactatggtctttaatcttttcacggtggggctccaagatctttataactaccagcaaagagctctgtgatttgccaaaattcaatcataaggaagagtaaccccctccacactgtttttattatggtcttttccctccttgctctactacatttgtgggcataaagctttgggggaatgaaaagtggctgcttgtcaccaaaacttggggactcctgctttctagagaaatctcaagagatagtgccattctcataaaactttctgtcttttcaaaatcctccttatagtttaagagtaaaaatttctaagctatatgttacctttttattcttttttccatttcattctaaaatatcaggatttacatttcaaatactactgtcaatgaggttatcatatgtagctctaatttatccgctttcttggccaactccaaaagaacaggctcagcagcgaggtcttgatacctctttttcccccagcgtcacaatcttccctagctcctgggcaaagtgattatcaaaagtagatgcattggagggtgtgtgtgcaactctgcttctctgttgttacccagacccaggaatctaataataacaatttgtgatggttagttttatgtgtcagcttgactgggccataaggtgcacagatatttgatcaaacattattctaagtgtgtctgtgaggatgtttcttgaggagattaacatttaaatcagtagtctgaataaagcagatggccctctctaaacttgggtgggtctcatcccatcagttaaaggcctgaatagaacaaaaatactgccctttcaatgagtcaaagggaactctttcaattcaaaggccgactgtctttgaattgggaataggtttttgtttttgtttctgttttcctgcttctggattcaaactgaaacatcagctcttcatgtgtcttcagcctgctggtcttcagacagaaattacaccattggctctcctgattctcaggcctttggactctaagattagaatcataccattggctttcctgggtctgcagtttgtcaactgcaggtcttggaaattttcagcctccaaaagtgtatgagccaattctgtataataaatctgtctctctcttactccctctctctcgattctgtttccccaaagaaccctgactaatacatggatataataattttacacttgaacatcacaaaatctcttgatgttgaaagggagatcttgattcccatgttttcataataagcactttgggagaccatgaatcttcatgtgtagatctttttggatcacttggtctagtgtatagacttggacctgagacccagtttctaatcccatttctgttaccaagtggctgtgtgattagggacaaattacttctcctctctgtgctccattttctcatccctatgagaaggatcacaggggattatccccagtgttttttttgtacttctaaaatcctagggatttaaattttttaagtaggaatgggatcatgtcctttgcagggacatggatggatctggaagccattatcctcaggaacagaacacaggaacagaaaaccaaatgctgcatgttctcacttgtaagtgggagctgaacaatgagaacacatggacacagggagaggaacaacacacactggggcctgttggtggggcaggggagggagagcatcaggagaaatagctaatgcaggtggagcttaatacctaggtgatgggttgacaggtgcagcaaaccaccatggcacacaacactacctcttcttaccttctccatttctctaagatatgggaggtaggtctactttgccaaatcaaaacattggcaatgatctgtcaaatataagctctgaagataccttttctgagaatctaggttcccagaggggaaatatttttttctcctgagcattctgctttctctattcacagacagattttcagctaatagctcttctttttccccaggagatctgagcagaatattttcagaacgtagacacagacatactttcttgggcacggacttacatacacaaataagcacactgacacatagaaagacacctacaccaagctgctcactcagagaccactcagaatccaagagattaaacttgtgcatgctattagcatggcttttaaagggaagagcttgttgcagtccctgggctcagttttgggtaagcacaggttgtattgggactaactgagcctgcatttaaccgataatacttctaattagacacatgtgctcttttctgagtgccctagtatctcactgagtacaattggtggttaactacacccagaaacaaagcagaccctgtaaacaccctttaaaagtgctggtctttgaggattgtttatgaccctaaaagaatctgtattgaggattagaattcacagacatgaagaactgaatactaataagcactcattttctttaagcctgttattgactttggcatatctttccatattccgcagtgctataaattcttcaaaccaacacagaacatcgtcatcaccctctctgcatagctggcaagagcagtgagagtgatacacagcttgtctgtgcccccaggaattcagagttgaaatttatgctgcatatgttcaatatgctaagcaagtttatgggttttccttgccctctaataaaacttacaagggggaaagtaaatattaagctctttaaagagatcagttaggaagcaaaacagattgtagttacttatttattcattccacaattagcttactgctgcacctgcctgtggcaggcccagttctaggcactgaagatacaaagcatctctgggaagaagcagacaaggatccctgccctcagagggtttacactgtagtaggtggaacataaggttttggagttgcaccgtctgtatgatatttaaagatatgagactgtatatgatcaccaaggaagtgaatgcagataggaaagagagttctaggagctgagaagcactctgtgcagtagtggggatgaggaaaaggctaaaaaagaacagctagtgaggatggagggagcccaggaaagcaaggtgctctgcaaacaaaattaagtgtttcaaagaggagaaaatacacatgtgtctacactgacaggtcaaatataaattgggttgaaagttaatgattgaatttcataatttagaggtcgctgttgatcctgacaagagtaattttggtggagggctgagaagaagagagttgactaaagtatgttcaagagtgagaagagaaaaataaattacagaaaaagaatattaattatctggtcattttgctcatttgttttacaatacaaaattgtaactatagttgaaagctacagcctgttatataaaaaaattagacttcaacaatatctccaggttttatttttttaacctgcaattttagacagaggttgtgttagttaggatgctattaataattttgctgcagtaacaaaggccaaattggcagtcaacaagatggaaatttatttctctcttacttagtgactacctgagtgaaaggattgaaggagaccagtgaagttgggggtctggatcgtttttgctctgccatgcttaacatgtggcttccaacttgtgatctaagatggctgctctaacttccactatgacttccacattctaacaagcagggactgggaagagggaagagcaaattcctgttttttaaggacatgacctgaaagttgcacatcatgttttcccacttcctattggccagaacctactcacacctagctgcaagggtgactgagaaatgtttgactgaatagttatgtgtccagctaaatcttcctattactaaagaagaaaaagagaggagataatggagagacaattcacaatttctgtcacaaagtttcactgagaacaactaaactgtgactatgaaataaaaatgttatacatttttataattatgctttactccaagtataattatattaaacaaataatggataatctacagtgaggtttttatattgaacttcagttttccccattaggaattagctttcaggccatactgggtattgtctgtcttactatggtcatttccttgtgtctagtttatatcttgtatctaacaattgagtaaaattcttattgtctgcaaatgcatttgtttacaatatagcctacaaaatgcctggtgcagttactttttaaacaagacacaacttctcttgatttttctgactcattttgagagctttctgttgtttattcactgttttgtgctatggtttctccccaaagaacactttctatctcattcttttaggccagtattaccctataccaaaagcagacaaaattatcacaagaaaagaaagctacaagtcaataccccctgtgaatgttggtgcaaaagtctttaataaaatacactaaactgaatccagcagcatataagaagtattacacacattaagaaggtttatacaggaccaaatgagatttatcccaggaatgcaaggttggttcaatgtacaaaagtcaatcaatgtaatgcaccatattaatagaataaaagatcatctcaataggtgcagaaaaacatatttgatgaaatttaacatttttcattataaaagacactcaacaaactaggaatagaatggaactttctcagtatgatgaaggtcacatataaaaaatttatggctaataacagtgaaagtataaaagcttttcctctaagaataggaacaatacaaggatatctctttttgccatttctaatcaacattgtactgaaggttttagccagggtaagaaaaagaaataaaggcatccagactagaaaggaagaaagaaaactttctatttgcagaggacatgatagtatatacagagaacccgaaagaatccacacacactgggggggccaaggtgggtggatcatgaggtcaggagttcaagaccagcctggccaacatggtgaaaacccgtctctgctaaaaaaatacaaaaattagctgggtgtggtggtgggtgcctgtaatcccagctacttgggaggctgaggttgcagtaagcgaagatcatgccattgcactccagcctgggtgacaagagcaagactctgtcttaaaaaaaaaaaaaaaaaaaaaaaaaaaaaaggaatccacacacaaaactgttagcactaacagatgacttttgcaaggttgcaggatacaagatcaatatacaaaaatcagttgcatctactcaaagcttggtgaaggctggtagttcaactttctgatgggagtttaaatgaagaagagtctgcccactgtgcagagctacacatgccagaatgtttcctgcatagcactatgaaacgatattctgcttgtaacaccttgggcttttctgtttcatttcatgcttgcaatggagtagcctaagggcatttaaagtccaggctgtggagaagtgcttttcattcatctgtagtaaaatgagaaaaacattttcatgtagtgatgcaagtggatgtagtgccattttaattcagtgtaaagaactgtcattcttttgagaatagattcatcctactttttgacattaaacatgttccttctttctataaatttatcatggtagtttatattaatatctttattatttttaaaaatttatttattttaatgccattacttggtaaagtgaaagctaacaaagctttctactgatggatttatttatttttgaaaatttactttgtgaaattcaagagtctaggaagtacaagtagaagctatgttagctgtgtttactacacctttagggctctgcagagtcaccttacctgtatctttactacttcctagtcttaccttcctttttctctttttctttttagcttgtctccttaactcttttgttatgaactagaaaaatgttgtggtggggaagaaccagaaaaaagtttgcaggatttggattgctttacttggagccttaatatcattcctcaaaaattgagaggttataatgtgaagagcatggaccataaatacttttagtggtcaaaatagaaagaactgggttataattgctgaatatttggttgagcaacaataaagaattcagaaattcataaaatggagcagttattaaccttggaacagtctacccagatccagcttggagtttccacccccgtagaatgctggccatgtcaacgcacgtatgcccaagttttgaggctgggcctggtaaactttgtgtagtcattccagctatctgattacaaaacattttgatgacctacccacaagtctcatgtgatttttacatcattgtgtgtgtgctcttgaatgttccaagttattcaagtaaggtctataaatcgatactgacccatgggactgaaaaatgtgcttcaaccaataaaaatgtgacaagaaagaacagtgctcacagtttcaacaacttcatttaaaaaattattttattttattttatcattccttctatgtgccactttaaaatattattcctggccaggagtggtggctcatgcctgtaatcccagcactttgggaggccgaggtaggcagatcacgaggtcaagagatcgagaccatcctggctaacacggtgaaaccccatctctactaaaaatacaaaaaattagctgcgtgtggtggcaggtgcctgtagtcccagctactcgggaggctgaggcaggagaatcacttgaacctgggaggcagaggttgcagtgagccgagatcatgcactgcactccagcctgggagacagtgtgagactccatctcaaaaaaaaaaagttattcctaataaactgtatttttttagagcagttttatgttcacagaaaaatggagtgggaagtacgagtttccgtattccccttgttcctatgcatacaatctcccacccacaatccacatcccccaccagaggggtacatttgttaccactgatgaacctacattgatacatcattaactcccaaagttcatagtttatattaaggtaattcacttttggtgtcatatattctatgggtttggacaagtgtttattttcaatgctctgttgacttcacttacttcatgattatcttgttcataatgataaaagctggtaaacattcttcaggcaagccggtaaaagttttgtagagcctgaagtgttctttttttctcttgttcacaaatcatcctttgcctgattaactctgttaagtttaatttgtcaaagtttttcttttagcaggagcaaagataatctaacaaatcaaagatggtcttttcaataaataatgctggaaagactggacatccacatgcaaaaaccaagaaccaaaaaccaaaaactgaagccagacacaggtctcccacatcacaaaaattaacttcaaatggataatagacttaaatgctaaacacaaaactataaaactcttagaagataacattggagaaaatctagacgaccttgggtatgactatggctttttagatataacaccaaaggcacaatctatgaaagaaataattgaaaagctgaacttcattaaaattcaaaacttatctgtgaaaaaaaaaaatgttacgagcatgagatgacaagccacagactgggagaaataatgacaaaggacacatctgataaaggactgttatccaaaagagctcttaaaattcaacaatgagaaaataaacaacccaattaaaattgtatgaaatacttgaacagtatctcacaaaagaccatacatggattgtaagtaagcatgtgaaaagatagttaacattatctgttgttaggaagcagcaagttaaaacaaaatgaggtaccatgacatccctattagaatggccaaaatccaaaacattgacaacaccaaatgctatgaggatgtaaaacaccaggaattctcattcattgctggtaggaatgcaaaatgcatacagccactttggaagatattttggaggtttcttacaaaactacacatactttcaccataagatccagcaatcatgctccttagtatttaccaaatcaattgaaaacttacattcacacaaaaacatgcacatgaatgtttatagcagcttccctcataattgccaaaactcagaagcaaccagattttctttaggcaaatggataaataaactgtagtacatccagacaatgaaatgttttattttatttttttactcttgttgggaaacagacaatagaatattattcagtgctaacaataaatgagctatcaagctatgaaaagacatggaggaaaagttaatgcataagactaaatggaagaagataatctgaaaagcctacctactgtgtgcttccaaagatacgacattctggaaaaggcgaaactgcagagacaataaaaaaatgagtagtcaccaggggctggacgagggagagataaatagggagagcacagataatttttagggcagttaaaatattctgcataaaactacagtggtagagatatgtcattatacatttgtcccaacccatagaatgtacaccaagtgaaccctaatgtaaaccatgaactctgagtgataatgatgtgtcaaataaaggtgcattgattgcaacaaatgtaccactttggtggggaatcttgatagtagggtaggttgtatatgtgtggggacaggggtatttggcaactgtctgtacttttcactcaattttactgtgaacctaaaactgctctaaaaataaaatttattaataaaaaaacaaatatacagaaacatttgggaaagtaagaggatcttaacggctattcacactttcttgtgcaaaagtttgggagggtcattttttctctacctacggggaaaatagctttgattgtgggtagaaaaaagaggaatatggtaattttagtgtttggaggaatgtaatagcactaaacttggggaggtagaaactagtaggttgtaggttgtaaggaaggtaaaacggtaccaataatttttgccaatttaaaaatgataaccaagtgtactggttaattttatgtgtcaacttgactgggttaagggatggccagatagctggtaaaacattatttctaggtgtctctgtaggttgtttctagaagagattagcatttgggttggtagactgaataggaaaggtcaccctcaccagtgcagatgggtgtcattcaatccattgagggcctgaggagaacaaggaaaggcaaatttgctctctctgagctggggcatctatgttcttctgcccttagacatcagtgctcctggttcttgggcctttgtacttagactgggacttatatcattggttcccctggtcctcaggcctccagatttgaactggtactataccatcagctctcctggttgtccagcttacagatggcatactgagattttgcagacttcataactgtgtgagccaattcctattataaatctccttttgtatatctacatatatcctattggttttttttctccagggatccctaactaacacacccagggttggtcctatgtggtatgaaggcagtgctgtgttgatatatgtaagtgtgtgtatagatatgtttttaataacattattatctgcatgcgtaattttgtgtcttcctttctaaagttttcaccttatacttccttttcttgtgttgtatgaaccagaacttctagagtaatgttgaataacagagaatgatagttggattcctagccttgttcctgattttaaggtgaacatgcccagagttttaatgttcaatgtaatgcttacttttgatttctgttaataatccaggatttaaatgacacacccataacaataaagtatactaagaacttttattagaaatggctattgaatttcataaaatgtctattaattagtcaaaattaattcatttctatttattataacttttgcataaatttcataactttttatatgtacatatacttacacacgtgcatagtttttgcagatgcataaatgtgtgatgtatgtactttttacatccttatcccaccttctcccatatcccagattaacaaccttaaatgtatccttctgtacttttctgataataacgtatttctttatatatgtatattgtatgcacacttttgcattttgcttttctcctttaacaatatttcgtggaaatatctccaagttaaacagatgttacattttggtcctgccctgctatttattaactgtatgtccttgagtagggtaagtaagttttctggcacaagtttttctacttaagaggacaactattcctttctcccaggactactgtgagaaccaaatgatatcatatatataaagcactaaacatggaacctggcaaatcgtaggctctaagcaagtgttacccaatctcatatccagtacagggagggcaaacctttgtcctttcccatttggcagttatggcctctgggctgaagatttgtaactctgccaatgcctgagcacctgtggagggtctggaaggatccctgggtgttggtttggttcagagcaacagtggtggagccccatgacctggttttgaaaccatgcatcatcacttcctagcacggacaactttctaaacctctctgtgcttccgcttcctcatttgtaaaatgggaataagagtacctgtctgttactcctattgtgggtgtaatgaaatcatccatgtgacacacttggagcagtgcctgatacattgaaagccctcaatgagtataagtgagtgaagtgacagggcacaagatttgaaatcaattggccgagcgccaccattttctggctgttggactttgagcaagttattattgccatcaaaagtaattgcaaaaaccacaattacttttgcaccgacatcacacaagctgactagatcccagtcttcatctgtgaaatggggctaatccccactttcaagcactcctttgagagcaaatgaaggttatgaatgaaggtggtgctcagagcaggctgcttccctgccagggttatagtccagccaatggactgaatgtgcttggctgtcctaggactgtacccagccttcataattctctcaattccaaacacaggcctgccaacgaacgtttagaacccaagttcactgtgaattgggacatgcctgcatctcatctgtccattctcttcaggtgctggggtcatgctttgctctcagcaggcattaccacttcattttgtttctttcctgtaaaggggaatacatattttatttaaaagttactcatcttgctctctggggcatggacctattgctagttcagtaggctttgtaggatgactgtgatgtgtgtttacagttagaggaagtgggaatgggaccaagatgaggacgatgtatatgaatttcagctgactttcttgccctctgcaggctattgcaatcctccaaggacatcagtttccttttcaaatctctgcatggaaactctctcacttccttccttctaaagcaaagctatacacacacacacacacacacacgcacacacacacgcacacacacacacgataaaaataaaaatgcagctttccaggcaggcatctccttcaatgcaaacacaaaatcctctcaagagaacaattcatggggcagacatcatcacatcagacaatttgtccatctcttcttgctgagacttacttgctactgttggcagtacggtaattcagtacgtttgctctaagcctgtgcataaaactgtttaaaaaatttaaaaaaaaaccttgtcccttacactgcattgcacgcatgcctatggggccagttcatgatttatttttattttttttcagaaaagaaacaaaagcatttgcacagctgtgggtttggggaattaagtatgattcagcagtaccctctcctggcctctttgggaactgtagaaagctctgaggtgaaggaatcttgggatttcagaggaggaaacccgtagaaataattggtttcttttctttgtaatccataataatatgagatatcgcactcccaccttattcaaggatgtttagtttcatgaaacatttctccatatttcagtaaattgtaataatcctgttactttttataaaattttttggcaacccaagtgaacaaataaccgcatttctgtgcatggtctccggagtcattggaatattccatccgggccacacttctgcctgtatccatttaggtggcacaattccaagaagtggtgcccagttctgctcttttattgaagaagattctgtcattcattgactggagtgagtatcgatgaacagaacaagttctgtgttcaaccacaggcagttccattttgaatcatttttccatgctgtggataccaagtatttgtactatgtgtaaaaggaattaagctggctaacttcaaggagatcaaatgctctgttttctctatcagacattctgaataattaagtgttatcttatatcccttacataaatgaccgagcttcccatacctggaacctaaccaattttgtaatttgcactaaggtgatactgttttcttcctttggtgtctgaaaaggcacatcagggtcattatcagttttttaaggaaaactgataatgttttgctaaaataggccgaagtgctgctgattgatggaatccccagagcagagcactgatttttcaaaattagtaaataaaaacacttaagcagttgggccaattggagagcacgtgcatatgatggaaaaatagggagtcaaataaatggattccagcctctgccacgtgctactttttaagccttagatttcttttttctttttctttttttttttttttttgagactgagtctcactctgtcgcccatgctggaatgcagtggcccgatcttggctcactgtaacctccacctcccggattcaagcgattctcctgcctcagcctcctgagtagctgggattacaggcactcaccaccacacccggctaatttttgtatttttagtagagacgggggttccaccatgttggccaggctggtctcgaactcttgacctcaggtgatccatccgccttggcctcccaaagtgctgggattacaggcgtgagccaccgtgcccggccaagccttagatttcttatctgtaaaatggaaccgctatgaggattaaatgagacaatgtgtgttaaattcttagcacagtgtatagaagcttacttaataaacatcagttctcccactctgtgtcatgcaggaaaagagagaaaagttgaaacagtttacagttgataaagcttgagttgtggaatttgaattaactcagcagtccccaacctttttggcaccagggaccggtttcatggaagacaaattttccacgaatgtaaggggttggaggagggatagttttaggaagaaactgttctgcctcagatcatcaagcactggattctcataaggagcgcacaacctagattcctcgcacgtgcagttcacaatagggttcctgctcctatgggatctaatgccgctgctgatctgacaggaggcggagctcaaggcagctcacctcctggtgtgtgcccggttcctaataggcctcagactggtacctggggttggggtcccctgaattaactgataatgtaacttttaaaagtgtagtggtgccgggcgcggtggctcacgcctgtaatcccagcactttgggaggccgaggcgggcggatcacgaggtcaggaaatcgagaccatcctgtctacggtgaaactccgtctctactaaaaatacaaaaaattagtcgggcgtgttggcgggcgcccgtagtcccagctactagggaggctgaggcaggagaatggcttgaacccgggagacggagcttgcagtgagccgagattgcgccactgcactccagcctgggcgacagagcgagactccgtctcaaaaaaaaaaagtgtagtggttataagcatgggctctggaattctcctgtgtttaaattctagatcttccatttagcaagctgtgtgagggccttacgccacttaaaccctctttaccatctcaggttccccagttgcaaagcagggatgataggaacatctactttatcgggttgtgtgaggattaaatgattcagcacatgcaaagtgtttagaaaagagtctgacatagagtaagctctcgataaacatttggttcattagtattaaaaggttttgaaataaaaagggtctggaaaatatcgatgattaaatccatatattttgttatgaacatgttcttttaagtcacatgcttattattttacctgtagtatggtgtcagccagcgctgtccaactgaattataatgtgaggcacacatgtaattaaaatttttgtagtagccacattaaataaaagtaaaaatcactagtaacaagacatattgacatcatgagccctttgatagaatgatctgagaaggacacttccgtctgtgatttctcttgccaaaaatgcacacactcattccaatcatgagaaaacactacacaaacctaaattgagggacatggtacaagataacagatcagtgctcttcaaaagtgtcaaggtcatgaatgcaagcaaagaccgaggaaccatcatagattggaagaaactaaggggacatgacaactacatacaacgtggtatcttgggttggatcctggggaaaaaaggacaccagtggaaaaattggtgaaatttgagtacactttgtagtttatactaatgtatcaatgttaatttattggttttgatcattgtactatggttatgtaagatattaacttaagggaaagctaggtgaagactgtgggaacttacacaatttttcctttaagttgaaaattagttcaaaataaaataattgaaaagttaaaaagaaataagtgaatttaaatattttatttaatgcaatatatctaaaaattgctttaatatgtaatcagcataaagttattaataagagatttaaaaattttgtactgtcttcaaaaatctggtgcatattttacattgtgcatctcagtttaaactagccacttccaagtgctcagaagccatgtgtgtgccaggggcagatgcagtggtgaggacctcatccagggacccagtgactccttgacagcatttttccgggttggctcctttcctgactctggttctcgtcctgcccccataaagccttagtactcccagaggagattagcctcttggaggggtgctcagattaaattctggtaacactggtggctggtctaagaaaataatgtcttaatttattaagagcatggtgttttctatgaaataaaatgctcatagacccagcagtttctaaaatgtgagatgggtaacacctgtttttggaggtctaaggaaaaatgacttcaggtgttacttggatatggcattaaataacattcacttaccaagtgaaaatattttttctcatttcgattctctttttttcctttagattatattaaagacctagactcatttaatgtctccctaacacactaggatatatatctatatgtagatctatatctgtctcttctctgttattaggatctggatagaatttaaggtattgtttctgttttatttatttttgtcattaccttttattcatggcaaataatattggctttccattcaattactgatatgaaagttttacaatttatttaaaataaaacataagggcacatttattaaaaatacaattattaagataatcatagtccaagcggcactggaaaatagcaaaaacaaataattaacaccaaaaacaaagaaacaaaaatcattcagggactatgacagtgtttacaacttggggagatcaattctcagtttcagaaatgtcctctcatagaagcccctaggaaaacaagcctgggtgttttcaataaaccaattccccctcattaaatctttccctagtaagattgcatttcttctcacagtcctcttcttctgctgctgctttctctctcttctccttttactttatttttgtccctcttgtcctttctctgctccctttcactatttccgttttaacctccctccctctggccaaagttcggctctcctcacccaccaatcacactgccggcctctaactttgggcgtagtacgtctgaccaatcagagtgcagcatctgccaccttgtgcttgcgactgacgttttcacaggacctgtgtacacacaggacatttccctggatattttggaatcccttcacggtttctttgacaatgttggtgtcaatttctgggcaattggagggtactattctctgttgaaggaaactttcccatgtcattctacccttgactcccttggaccagacaggtggagtttccaggtgcatacggttctcgctattttatgcactgatgaggcagtaaatgaaacttccaaaatctggtttgcgtaatttatgcctttgaaaggctgatattattgcattaaattctgagggcatttaggaaaaacactgccactgaaactctaaataaatatatccaacacagcaatttgaaaatgatttgagggaaagtaattactcggtttccttctctcccaccatcgttatggatggagtttgacaggaaggaaagctttaacggagtttttctcactaggaggtaacataagcaaactttttgacctcaaacctaaaaataatgtcaagttctgcatttagctgcatcacacctcttctccgttctcacatttcataatattagttgtcttctttctatatttagcttttggagcacacaaagtaacgaatagcttcatgtttttactaaatcttacaagtagagcaagaaaaagattttttttttaaaagtaaacaacctctgcatcttcagagcaaaacccactcagaaaacttgtgccacaaaacctcactaccaccacagcgccagctcagggaccctgacagacagctggagctgtttaccagacaggccaccctttgattcacatgggcattacaagtccattgtttgtttgaatggcgtaggcaacagagctgagacaactttgatggataagaggtgagaagttagatgttattttttttttttgttacagcaacaagcagcagcagctagtacttattgagaaaataaaacgttaggttttatgtcatactaggtttatgttagcacattagtcgaaatgctttactatgttaacttatttaacacgatcccacaacaaactaacaggagataggtactgtcatgatcttcattttacagatgagaaagttgaaccttgagtggttcccttgcttgcccacgaacctgcagctcgagagactgcgaagcctgattcaaacccgaaaggcctgtctctgcagccagctcttcatctctgcactggacaacccgcctctctgaaggaagcacggttgcttcaacagtttgtagccaagcaaagagtctgtgaagggaatccagtttttctattttgaaatcaagttggatttcactggaagaattcctgggcactgggtctaataaaaatcacatgtaaggatgcaggaaaacttctcattttatatatttgaaggaaaaactcatttgtatccatgatcgttagcaacacagttcctcagtgagtcaagtaaaaatgaacatctttggaaactgaaactaaaataggacaatataaaacaaatgacttttattacccaggactttttaatcattgagtctgagatctctaaaactttagcaatttggttttgatttttttttttttttttttgagacggagtctcgctctgctgcgcaggctggagtgcggtggcacgatcctggccaccgcaacctccgcctctcaggttcaagcaattctcctgcctcagcctcccgagtagctgggatacaggcgccggccaccacgcctggctaatttttatatttttagtagagacggggtttcaccatgttggccaggttggtctccaactcctgacctcaggtgatccgcccgcctcggcctcccaaagttttggaattatgggcgtgagccaccgcacccagcctgattttctttcttaagtttattttttagattcactcccaagcctacttgatgcttttattctaaggcagtgggttcccaggcacaaatttcacaaaagattccactaccttttagtaattgcaatggaaacaggggatatctgggtagtatttattcctatggagagaaaaaaagtatatgattgtttgaggctctttctttgctttgctctccactgctgtttaaacttcccctgttcatatagggcagcgaccaacaacaaactgaatagactaaaccttagtgagcagatcctgcaaattaaggtggttgggttaggtcaggctacggcttcaaagagatccagctgtctccaataaggatctatcaataacctttgttggagtaagaatacctggtagtcaggtaaggaactgacttctatgattcagggatcttatcttacctcattttgtaatttgagttcttgttcttttaccatcagttgagtttattagtgactttccatacctctttacccagtaagtagaccttaatacagtatcattgtgcaggaagagatgacacattgagttctaaaatgccaagtccttgcttataaatgaagctttgtcccactagttggtagaagagtcagtggttcagccctacatcaattcccccaaatggctggcaaataaatgtgctaattattttgttgtcccaaaagatgcatctgatggcagctattgatggattggtaggtaagaaagtggccatgactttgccttaggttgatatacacaagttgcagcttcaggatgctgacacagtggattgatttggtttttttggtctggcagagaaattcagctttttctttctctttgagtaagtctttaccttgggaactctgggagtgggtgtattaatttgttaggctgccacaacaaagtattatagactgggtggcttaaacaacagaaacttctcataatgctggagcctagaagtggaagatcaaggtgctgtcagggttggattttctgagggtcaggagggaaagatttattctatgcctctcttcttggctgtacatggtcatcttctctctgtgttgttcacatgatctctctgtgtgtgtgtgtgtgtactaattttttcttataaggacacctgtcatattagattagatcccacccatatgatcgcattttaccttcattatctctttaaagcccttatctccaaatacagtcacattctgaggtactgggacttgtaatttcaacataggaattttgagggggacaggattcagcccatattgtgggtaatctaatttgttctaggttggtaaagaagagatgcttagctttagagtcagccttcaaaattaggagttgaaaaagtccgtctttggtacacatagtctttctttggtatgcatagtcttgtaggttttttctgggtcctttcttcattatgttgtcactatcttttttttttttttttgagacaggctcttgctttctcacctaggctgggtgcagtggtgcaagcatggctctcaggctcaagcaatcctcccccttcagcctcccaagtagccagaaccacaggagcaccccaccatacccagctaatttttagatttttggtaaagacagagtctccctatgttgcccagacttgtctcgaactcctgggcgcaagtgattctcctgcctcggcctcccaaaatgctaggattacaggcataagccaccgtgcctggtcatcaccatcttatttgtcataatcagattctgaacttcactgttctatctccctttatggtcagtgctattcctcaagaaagaatctgatatcagtcatttctatagtggagcaatttgaggtcagggaagtttatacgctatgtaaatgcagtgtaatgaaaggctttgtttccacttaaaggaaattcacgtattagtgagtagatcaataggtgagaaggccagtgagctaaaggcctttgtattgcctcatccctgaaataacaatagatagccaggcacttactatatttatctctttacaaaatttgttcttgactcaattgggccactctcccgctccaaggaagcaggcaataaactcaagttcgagtgactgagaagagtataatcaaatcaatgatgattagccaaggtgtgagcagggctaaagaaggtacagaagcatcccagggcaagcaacagcaggaagctgttcccacctccagatctgaaggtcagggagagaatgcttaccagaacccaggcagagctgcaagggtcgccgtagctgtgcgagaaggctccctgaaaggagctgtggttttgcaggaaggtcgccttgggaacaaacactccagcctcactttcctcccgcccttccgtctccagccagaactccagcagctgagagcaagcggaagccagaggctgggggagttgtggtgctctgtaagccttggcatcccacagcacagaggagggtgaaagagggtccttctcactccaaggttttcatttcttgttgaatatgaggtacctgagcatcaaactataccaggcctttgaacagtcaaacaatgagtgctaattccagactcccagtttcccctctattttgaaagatgaaatgactaagaaaaagcttccgttaatcactggcaacgacttagtctaaaagcttcactatatatcctacctgagtaagtttttgtactgtgccttctttgagcatttattttatccccagtgtcagcataaagaaagcatcttcccatctgtgcagacctctgctgtttttgtctgctcaacatttctttccttcttttctggtaatagcacctagattttcctttaggggccactattcccctgtctcatagttcatgtggttggcgtagagcagatctcactcctggtctccagggatgggcacgtgggcaggcctagctgaacagagttctgcatctcttttgctactggaattatttcaaaaacaggcatgtgacctgtgtctgtccagagcatcacacctaggccttttgccaatgctacactttttttttttttttttgagactaagactcactctgtcacccaggctggagtgcagtggcacgatcttggcttattgcaaactgcgcctcctgggttcgagcgattcccctgcctcagcctcctgagtagctgggattacaggcacctgttaccgtgccgggctaatttttgcatttttagtagagacaggattttgccatgttggccaggttggtcttgaactcctgacctcagttgatccgcccgccttggcctcccaacgtgctgggattacacgcatgagccaccgcgcctggcatgctatactgtttataagctgttgagcttgcacagctgggaggagagaagcatagagattcttggaagaacctgcttcagaatgaagtcaacacaaaaaacagcaaaaaagagatacaaggaaagatagatttctggatctagctgtacctgaagctagattttcctgagtttaagtttcatgagtcaataattcattttcttaagccatttgggttttggtcacttacaatggaaatctgtcactaatatattctctgtgatcttaaagtcagtattgctttatgttgggttatacacatcttgtttatcattatgtagccttggttcagtaggtgcttttgtgttgcatgataagaattagcattgttgaaaatacatttgttagcagaaaaataaaatgctttataggctgtcaactggcatcttttagggggaaattgaagccatctataaattgtaaagaatacgacttgttggccaggtgcagtggctcatgcctgtaatcccagtattgtgggaggccgaggtgggcaaatcgcttgagcccaggagttcaagaccagcctgggcaacatggccaaaccctgtctctgccaaaaaaaaaaaaaaaaaaaaaaaaattagccaaatgtggtggcacatgcttgtagtcccagctacttggaagactgaggtgggaggattgcctgagccccgggggcagaggttgcagtgagccaagattgtgccactttactccaccttggtcaacagagtgaaagcttgtctcaaaaaaaaaaaaaaatcacttgtttgataaaataatgcaacatgcagacacaggccatccccatccataggaacacacagcattaattttttagttttttatataatagcaacaaggctactagagcaatgaaaaatatagcacatttagaagttgctattgtttcttatacatctttatcttaaatatatttcagagtctctttccctcagtctaagaaggataagtagaatagttccaattacattttctatttgttttgctgttattatctttcaggctatcagtatgtttctaagggtatttcccagacaaattttcaaagctggaataggtatgtactctggcacatactgttcaggctttgtccatctgacactaaacacttaaaaaaataaaatttagccaggtgcagtggctcatgcctgtaatctgagcactttgggaggctgaggctggtgaatcacttgaagtcaggagttcgagaccagccaggccaacatggcgaaaccctgtctctactaaaaatacaaaaattagccaggcgtggtggtacgcacctgtaatctcggctacttgggaggctgagtcatgagaatcacctgaacctgggaggtagaggttgcagtgagccgagatcatgccactgcactccagcctgggggatagagcaagactctgtctcaaaaaaaaaaaaaaaaaaaattcaaccgtttggaaggtaacttccacatggctgtgagggaggtaagacaacatatggatgtctgatgtttgtacagatgatccctgactcaggatggtttgacttaggattttttgactttatgatggtgcaaaacccatactcatttagtagaaacttaacttcaaatttttaattttgatcttttctggagccagccatatgtggtacaatactcttttgttatgctgggcagaagctgcagttctcagctcccagtcagccacgctgtctcaaggataagcagccgattcttgatacctttctgaaaaacactgtgcctgctaagccatcaacaagtgtcaatgccccactgccttctacagacgctcagcagaagagagaggaattggtgacctatccctgtagtatccttattatccagcaattaactagttcaatgcctcacatctccttcaggtcccagtgtgccttcagctgtgtatgttaatggtgcatacccatatacaaacattctgtttttcactttcagtgcagtattcaataaatttaatgagatagtcaacactttattataaagtgttgtgttggacgctttgtgttggacgcctttgcccaaatgtaggcttaataaaagtgttctgagcatgtttaaggtagactaggctaagctacaatgcctggtaggttaggtgtattaaatgaattttcaacttgggatattttcaacttacaatgggtttatttggatgtaacctcattgtaaatcgggaacgtctgtaaaggtaatttatactgtagatatagaagcatttatgtatatgggtttggagtcctaacttgaactttaatggggaccctgacctgcttggaaatgtctgataaactgatggatcaggccccctggcagggtgctgcttggtcaggagatcatgtgatatggtttaagactcctgatatttgctaccaaattgctgtttagaaggttgtatcaatgttcactcccactagctgtggataaaaatgtccattacttatttccttactaaaactgaacattagattttacttaatattcttggaacatcattgaatatcttttaaatatcatttcaatgtctttaattttttccaaaattgatagaaaaaaatgaatcttgtggtttcatatatctcattcatatttgctaactagtgagcttgaactttttttgtcttaatgtatattttggacttcagcctttcttcttttgggaattgcctacttaggctttttatgcgtgtgggtgaattgcctatttagactttaattaaaaatttttttcatcttattaataatttgtaagaagttttatgtattgatctcattggcctttggctgtcatataagttgcaaatattttttctcccttcacgattttacttttaattttaaattttttgatgcaggaatatgtgtgagtttttaggaagtaagcatatcaaggtttttcttttaaatttcctttgtttttaggtttcaaaatacctttctaaatatatagatgaagatctatatattttcttaaatatgccctttttttggcacatgattatggcttaaaaaaaaaaaaggctatcaatacagataaggagaatgtctgagaaataacgaggaaggagttcatccttccaagcagctagggaatacttttctaatctaaattttcttccaatttatttatgatttcatttttgtacatcttgattcatgaatttattttgccgtattatacgaggtagagttctaattccatttttttccccaaaagtttggctaattattcctaacacgttgtttagtgagaaatacgtatttttcccacagacttgaagttctatgcatctgtcattttactgaatacctgtattattaggatttggttttggattttgtgttcagtttaattcttatgcctattcgtaggctcaaccactcatcacttcttcttctagcccattaattgtcttggttattcttaacttcattcttccaaagaattcctggatcattttgtcagactcccagatgtgataaatacaattggtattttggttgtaaaaatattatatttataaaataatttggagagaattaatatttttataacattgcgtcttctcattgagaagcattgtatgccttacatttattcaaatcttctgttaatgtccctctgaaagcttcttagttttcctgatataaactatacctgtttattgttattttcccccttataattttctaaccattcattttccccctgacatttggcttttcttatatttactttgtccttggctgccttactaaactttcttattcattctcttggattttcttggtaatcagtgacatcagagcaaacatctgataattgtttcttctctttttaaaaaggtataataattatttcttgtaaatttctttctggatattgaaaaacaataggggtagtgccttccttctaacctcaggggatcccttcagtgtttcataagtaaacataacaatgtctggtaatatgtggtatgacttttcatcaggctaggaaatatccttctagttctgatgtattcacagatttttctttttaaaaatcatgcaaagttactgagatacagacattttattattaagcaatctttgcatgttgggagtaaatcctatctggtgaattatttccttaagaaaccactggactagattttttagtatttaatttagaatgtattatattcataagtgagattggtttgttaatctttttttgagttaagcttgttagattttgtcattcacaaaataacctgaaaattttccatttttacctctagtgctcccgactagtctaaatagcacgggaattttctactttttgagtcattaaataactcatttgtagaatagtcagggttcagcccttttgtatgggttagtttcttagttctattcctattttctttcaagcttgtgagtctgttcagttttttatttctgtgtcagttttctgtgtcccagaacattggccatttcaaccatatttttaaaagttacatggtattttgtgttgtattttctttaaaatttaaaaaatcgatcagtatctgtattattttcttctcttttaatattgtgcatatatattttccttttcctcatgctaagagagtcttgctcaaattaatatttttaaaagtgaaaacaggaattttgttttattatttacaattttttctatttcctaattcagtattttttccatttgtaaatatatattaattctatgtttctactttttaaaggcttatttagtttttctttttgtatctcttgatttaaatgattggctcattagtgtcatttcattcttgttaaataatataaagaaccaaaggtgtatgaatacattttttctcaattataacttgggctggccacatctaatttgttttggtaagttatgttttattaccctactttctccaagtagtctgtaattgcaatttactactttttttttttgaggtggagtctcactctgttttctaggctggagtgtggtggccgtatcttggctcactgcaaccgccgcctcccaggttcaaatgattctcctgcctcagcctcctgagtagcttggattacaagcatgccccagcaatcccagctaatttttgtatttttagtagagacgaggtttcaccatgttggccaggctggtctcgaactcctgacctcaagtgatatgcctgccttggcctcccaaagtgctgggattacaggtgtgcaccaccacgccctgcctatttacttttgaccatagtgttagagagggatatttgaaattgtcaagtagctatgttttaacactttaaatgtttcttactaatttttaggtttattgcatagtgatcaataaagatataaatttcctgcctttgaatttatattgaggatttctttgagttctaatacatagttgcttttcataaatgttccatgtgttggaaaagcagatatgttttctaataaactagaagtttaatatgtatctaataaatcaaatttttgcatttttattcaaattctccatacattttgcttatgcaaattatcagacttaatgcaatctctcataatgattgtttccaccaattttacatatatttctggtagttttacttcatagatttcaatgacatattatacaaatataaagatttattactactaaagcttcattgtgaattatactttttatgaatataaaatagttttttctcgaatttttctttgatattatcttttgacccatttttctttctatttttaactatttatcatactcatgcacatcttacattttcccttttttgtcaatttcacattcaagtgctttgcatatctatctatggggtcttaatgtttttcagtaaatttgcatgaggatttaaaatatgacaaatattaatcctttgcctctttcctgtaagtattctcttgaattataatcattgtatgttgtgtacaaaattccttttggatccaatctattaacatttctctacgaggtttcttgtgtatgtagaaaatatttctttatgttctttcatttattaatgtgaattttataatttaactttttaatttatatgcagttaattttgatgtagagtgtaaggtatagatctaaatacatcttttttaaactagctacccaaatgctttgtcatcatttattaaataactcttcttttctagctgatgtgaaatgctatttttggtagatactagaattcacttgctcaaattccactctaacatccaagtgagccttcctatattatagtggctgaaaatttgaaaatgagctttcctggggttccttgcagctatgtttcagatgtaattttgtttccaccaatcagatgtgccgatacctcacttgcttttgaaactgcattaatggcagacaagtgatagacatctatttttctagcacaaatggtcacagcaggatagtcttatagccagtcgatttgagacatggcagcctctaacaatggtcatggcagcttttattattatgataaaaaccatgtaagtctgggggctgggagttatttctagaagctaagcccaagaatctgcttctccagcccttccaaatattttgtaatatctggtaacaaatccttttctggttaaactagagagaatggtttctgttatctgcaactgaaccccatccagtgtaatgatggtatcaaacattaaatttttatatacacaaatacctagttctggatatatagtctattctgttgaattgtctatctttattccagtctaacatgattgaattattataactttataatatggtttaatgtgtggcagtcctagtaattgtctttactcttttttactaaaaaaagttttcttttggatgaactttaatttcactctgacaattctcactcgacctgtgctccttggagattttgattcagtatgctatatgaagaaactgctcatcccctgggctggaggtccagtttgggtttacagtgtcttgatagtaaatctagtgtacctgtcataaaataattctaaagacttaagatgggggttgggataatagagtgtgatattaattttcatggctttataaccacatctaccaaaactgtttttattttttatatcaaatgacttattaagaggtaaaataagaaaggtctggacacttcagtgcatctctaatttgggaaatgatcaatggtcaacagaggggagactgtgtctagtagtttttacaattgtattcattaggcacaggaaaatgtaaactcagagagtctaagatagaaccaagcctccaggataaacttcagcaagcctaacccctttgtttctctttttctttctagacacttgtaacagcactaatctagaagtgagtacatatgagttctggtcctggcttagctaatttgggcaaaccgtttaacttctttgagacttaggtttccattctaacaaggtgtaggtgataatatccattttgtgcaaggtcattggtttttaccgtataacgtgtgtaggtgttacacacactgtaccatcccatacaaatgtgagttaatgtattttctgtctttattatctcttttacctgccttaatcaccaagacattgtgatctgtcactccatcttctccattaaactcttcaaccatttctattttttttggacaattacttatctcagtcatcatttcttataattccctgtctaaccctaaatgtctgtgagatccttgcccctcttctcaagtggttcaacacttaagaatggggacaattttatttttatttttatttttatttttatttttttgagatggagtctctcgctctgtcgctcaggctggagtgcagtgatgcaatcttggttcactgcaacctctgcctcccagattcaagagattctcctgcctcagcctcccgagtaactgggattacaggcactcgccaccgtgcctggataatttttgtatttttagtagagacaggtttccccatgttgtccaggctggtctcaaactcctgacctcaagtgatccacctgccttggtctcccaaagtgctgtaattacaggcatgagccaccacgcccagctgggacaattcttgttatatgttaatttcttaaaaccaccaaagtctattcaatatatgatatagtgattaagaaataaaggtgtacattgataaaaagtatgaagtttcacatatgcacattcttatagcactcataatggcatctgttaaatcttcatctaacttttaaaataaaatggcttgtaaaagctatgaattactaagctgtgggatgcttttgggatctcaagtagtaatgtggaagtctaggcactcagcactgtatggaatcaaaattccagtggaatatggagagcagaaagattgggcagggagaacttgtgaaaatttaaacatgattttcaggttcatttggcaaaaaaaattaggtgacaatggatatttttaaaaaaacaccaccaacaagggcattgcctggccataatttattgagttattttaacactttcattctttgtgctttaggtattctgcttcctcatacttaaggtaattttgtaaaactttatggaagaaaaaacaatgacacacactcacacatagaatatttgtttattgctgttataataaattaataaaaaacccaagaaacctaaaaccattctctctagtttaaccagaaaaagatttgttgccagatattacaaaatatttggaagggctggagaagcagattattgggcttagcttctagaaataactcccagcccccagacttacatggtttttatcataaaaataaaagctgccatgaccattgttagaggctgccatgaccattgttagaggctgccatgtctcaaatcaactggctataagactatcctgctgtgaccatttgtgctagcaaaatagatgtctaccacttgtctgccattaatgcagttccaaaagcaagtgaggtattggcacatctgattggtggaaacaaaattacatctgaattttgtttgctgaattgctacatgggcataggagaaggttttgaaagtgcagaaaacataaaggaaaaataatcattagttatacttagcatattaattagcaaattaacattctggtgcctatcctttccctttttctatatattgtttttgtatatttttctttatagatttttatataaaatttttaaacattaagcttatatatatgttgtacatatagcttgcttttttcatttactgtatcatgaacattttttcatgatttcacaaaatccttggcttgtacatctggtgattacacttttaacagtgttggactctgctggaggtgatttttttcccttcttggtctgagagatgagcagttatttttctttttgaaaagagaaagccaattttcagtttataccagtaggtgtcatccattcacacaaagcataacccaagaaacctaatataatttgacttaatctctataatttctaccaaattccagtgtagtgttccagcctatctaagctccttgggtgaaggccatttaggctttcagttggatttggagaagaggttatttttgccatttaaggtgcttccaaagaaaagaaaaaagacagcagttttgaaatggaatgcattgcatagtttgaagttatcattttatatcctaaaaatacatcaattactgggaagaggttattaaaatcttaaaatcttactctgaacagccactcaaagaagaccaatgttactattttcatgatttttctgaaagagggtaaccagtcttaatcctgagtacaaaaatttgggatgagtccaaacataatacaatatttcaaaaatatcaatgatgattaaagagtcatgaaaatttaaaataataataactatatttttggcattatgtactttttttttttttttttttttgagatggagtctcgctctgtcacccaggctggagtgcagtggcacgatctcggctcactgcaagctccgcctcccgggttcatgccattctcctgcttcagcctcccaagtagctgggactacaggcgcccaccatcacacccggctaattttttgtatttttagtagagacggggtttcaccgtgttagccaggatgatctcgatctcctgacctcgtgatccgcctgccttggcctcccaaagtgttgggattgcaggcgtgagccaccgcgcccggcctatgtaatagtttttaagagctttcatatacattaccttttggtcctcacaaggatcctctgtgattacaaatgagtgaactttcgctcagagaggttaggcatctttctcaagaccacacagttggtaagtgacagagtcaggtctaaaacaaaggtctttgaattttatgtgcatatatatatatatgtatgtatgtactgccaattgagtgtcatcctttaaagcagaagttaaaaatgaatagtccatgggccaaactggatctttagatatgttttgtttgcttcctataatgttggctcatggtgtattttaaactttttgaataagctccaaaatttaaaaatggggatgtttcccacaaagactagaatttcatgtgtctttggaaaaaatcagaagagatggttacactggattcatattccctagcggcaatgtacagctgaagctgtgtgtgtgtgtgtgtgtgtgtgtgtgtgtatgtgtgtgattctagctggttataaactgtagagaagcaacgtggcatggtttggctgtgccccacgcaaatctcatcttgaactgtaatctccttaatcccatgggtcataggagggaccaagtgggagataattgaatcgtgggggcagtttcccttatgctgttctcacgatagtgagtgaattctcatgagatctgatggtcttataagcccacctcatggatatgagacatggaatcaaaggagatcatttcagaactttaaggtttagtgactgccctattggatttcggacttgcatggggcctgtagccccttcattttggccaatttctcccatttggaatgcgtgtatttacccaatgcatgtacctcctgtattcgtctgttctcacattgctactaaagacattcctgagactgcgtaatttataaaggaaagaggtttaatggactcacagttccacatggctgggaaggcctcacaatcgtggcggaaggcaaaggagaagtgaaggcatgtcttacatggtggcaggagggcttgtgcaggggaactcctatttataaaaccatcagatctcatgagacttattcactaccatgagaacagtatgggggaaaccacccccacaattcagttatctccacctggccctgcccttgacacatgggaattattacaattcaaggtgagatttgggtgggtacacagccaaaccataccactcccattgtatgtaggaagtaagtaacttgcttttgactttacaggctcataggtggaagggacttgccttgtttcagatgcgactttggacttggacttttgggttaatgctggaatgagctaagactttgggggactgttgggaagacatgatggtgttttgaaatgtaaggacatgagatttgggaggggccaggggcaggtttggctgtatggtttggctgtatccccacccaaatctcatcttgaattgtaatccccagaatccccatgtgtcatgggaaagacgtgatgggaggtaattgaatcatgagggtggtttcccccacgttgttctcatgatagtgagtgagttctcatgagatctgatggttttataagcatctggcatttcccttgctggcactcattctctctgctgctgccctatgaagaggtgccttctgccatgagtgtaagtttccttagacctcccaagccatgcggaactgtgtgtcaagtaaatgtcttatctttgtaaattactcagtctcaggtatttcttcatagcagtgtgagaacagatgaatacagaactgtagaatggtaactcaggagccaaagacagaactaagggagcctgaactctgcagaggctggaaggaatgggatccagagaggtgccttacttatgttttgaggaatatactatcattggaatgaaggccaacatgaataagtggcagtatatttgttaaaaatatcaatcataccatttggcagtcacatctcatgctgatttttttcacccctcatggaaatatataatcagttttctgggctttatggattaattaataactttaaatgagaaaatatttggctgtcaaaatggaatatacttttgttttatgattagagatgggcaagtgatgagagatgaatcaggatgatgaattatatatttattcaattaatttcaatgtgaaatacaaacatgttttgataattttctgctctcacattatgattcagagtgaaaaattgtcattggtgagcattcccaaggtcatatggttcctccaaaagtcaaggattcttcaaacacttgttcattcaataaatagttgtggagcattgcaaacatacttgcaaagaaggcatctttaggctgaggcgggcagatcacaaggtcaagagatcgagactatcctggccaacatggtgaaaccccgtctctactaaaaatacagaaattagctgggcatgatggcatgcacctgtagccccagctactcgggaggctgaggcaggagaatcgcttgaactcgggaggtggaggttgcagcgagctgagaggttgccaccgcagtccagcgtggtgacagagtgagactccgtctcaaacaaacagtaacaaaaaaacccgaagacatcttcagttcttgttctgatgtttctcacagtttagtagaagctgttggaaagcaaacaggccattacagtggtataattgttacaattgttacaggtagctagacaagcatgagctgggcaggagagggctcttcccccactcataggaatgctgggtgatggtttggcaattatcacattgcctctctaaaagtgataaattggcagctggtgccagggagaggtcatttcctgatggtccacacctgttgcactaaagtgttaattgaatgcgggtaccaggtagaagcaacttcctgggcctgcgcattaagagacaaaatggcctctggaggcacaccaccagaaaagggaagaaagcctcagatgagcacacgtacagtttcctaaacacactgcatgtgctcacctcctaagggtaaggagggcactgcacatgcgggcagcccaccctaagggaagaatcctgtgaaagaggccagcctataaagtcctaaaatcaaggttaaacaccacacttgaccttgggcctcttccaagcacatgctccttttttctgttctaaagctttttaaaataaacttctattcctgctctgaaacttgcctcggtctgtatttctgccttatgcttctcagtcaaattctttgttctgaagaggcaagaaatgaggttgctgcagacctgtacagattttctgctggtaactaagataccttccaccgataacataatgatttctaggatgggggacacagaggagcattgggaggttgcagaaaagccactaaatggacactagttatgggggtggttgggagtgaatgacattggtttgatgtctttgatgaatcgatgggtatggaagcaaaggcctgaagaatggtggaatatctgccaaagaaggtaggctagagtggtgaggaggggaagcacagacaaaatgatggctcctggcagtagaaggaagagttagtttggggaatttggagaacttcatgtcattcaacgtgatggaaacatttggtacagaaggaagaaagaacaaatgtggcaagagatgaggccgaactggggaaggagttgcccttcataaggaatcttgaaggggtgtgggccttacctaagagaggaagccagtggaggatcctgggtggggcggggacacagatgaattctatttacattttacaaagattactctggttgtagcatgaagacagaccaaaatgggacaagggtgggaatagaaatgacagaggcctgatctaagtcagtgaccttggcaagcgaggaggaaaaaatacttgagagacagttaggaagtagagtaattggggtttatcggtgaatcagcaggaaaagggagaaggctggttggtggtaccactcaacagtataggcaaggtaggagttgaagcaattgtgattaggaaggacctctcacttttgatgcttgtccctttcagaatggcaaaccaagcttaggtgaagcctagatatttgggggttactttctaaccctattgcttggactcaaccatgctggtgtctgagctcctctactcagacaaatgttgctttcagtaagttgcaagcaaagcaaaagaaagacattcacctacggcccttcagaaaagcaagcatgctgcatgatgaactctggtgcccaggaggcaagaaataaaaaacacttttaatgtaaccaactttccatgccccaccctcaccccaggcgtctgcatacacaaatcaaaaccatcttaagtcatggaatgaaaaaaaattaaaagcaaactaaaagcacttcctgtgaggtgaatggaaatttttgcccagttaattttccaggcacgtgaaagcagttctgaatattttaaaccacaagtacttgtattcttgaccaagatttttgagaaggcgaggcatgggaaggatcattgaaacaggactttgacataaaacattgtttacatagaagtgagctcttctccactatcggatcaatttaccacccagtgtctgacaaactgagaagcgagagggttgggaaaaagcaaagagatacatatcaaacaaaaccacacatatccagttgaactaaagctgaatttaaccataacttgtgcaacttttctccccttgaggtagaaacattacacctccaattgaccaggacatctttttttgcattcaaattatcttggaatttcctctaggacctaagtatccttccaccatgaaaataggagaccaaaaaaagtaatgcttccagtaatttctagccaaataaatgaggataagtgtgtgagtgtggtggggtagttaagagtttggaatccagagtttcactgtctggatttgaacaggctccgttgctcatcagctctgtgactccgggcaaatgactgaatctctctaactctcagttttctcatctatgaaatgagaataagtaacagactctccctcgctgagttgtttgagaacgggatcagacaatgcacgtggagccccgtgtctggcacacactatgtcctcattgcatatttattattaggtttctgctttgtatttttctctgtgcaacagccctgagctctagaacttatgacagcttttctcaagtgaagttaaagttccccatactcagttccagagctaggcctcacctaggttggaagaagtcaattgttctccactgcctgcctgtgtgctgggaaaggactctagcacagtgccggtggggctggaagcctttcctcatgatgctacggggagtacagtgaaaagggaggagattggggtagcaaggtcccaggggtcctggcagcccaggctctacttctcaggctagctcagtccctcaaacagcttccttcacacccactgctgagacccaggagccctacagaaggtagctaggggaagcttcagcagctagggggatccctgcaggatcagcctcctccttaccttgcagaccccttggctgtggtctggcattcctagtggctggcctaaagccccaaacctggaatctgtttcagagcctggaccttttggactcacaccttggtttccctggccagctgatttcagcttctcatctaaatgtcatttctgcaggctaagggaagtccagcctggatctagcatcttggaagcgcgttcagacttctggatggagggatcagcaggccttggtattggtggttctacctgcttcggttaagagtgaggactctggagccagactctctaaatcatagcactgacacttactatatgacttgggccaggttcgttacctgtctgtgcctcagttttcctcatctgtaaaatgggagattagtggtcaccattgggatgattaagaagattaaatgagttaatgtatgtataaactatagttataatgtaaatatatatacaaacagtaaccatttacatgcatataaaacataatataaatgtaatattagctatattcatatataaaaataggtatattttatatataaaatatattacatttaattttttacattttgcattaagatatattatttcatataaaacatttaagtacatatacatataattatctatgtaattattattgttattgttgttattgtctactttacctccctgcagggatggggagaccacggcaggcttttaaacattcttggtctcactgagccgtaggtgaggaatccctggttcctacagactctgctgtaatatgaggagcagggtttaagttagtttaaaactgaccccatcatttgaaacattgcaatctacaatgaatgccacataaatatcatttctcagattcctatgatgctcttctttcagatcttttcacttcaatttctataataattttgtttgtttcttgtcctatttcaaaggctttcttatctctggagcacctagcataagatagaaatgtgtcaaaatatatgttttattcatcatgtgagtatttttaggtcctgttaacccccataactattgattcagagaagtagggtggttctgaaaaatacaggcataatctctttaacttgttttataggaaccagaataagggtaatgttttcctctgtcttcaaaatcatcaataatccatgcattgtttaactcatgtcataagcaataatgcctttcatatagccattggcatcaaagaagaaacacccccttgatttgatggtaagcgtgacactacataaactcccagaaaacccacttcctttccagcaaatagaaaacaaccgagagcctgaattcactgtcagctttgaacactgaacgcgaggactgttaactgtttctggcaaacatgaagtcaggcctctggtatttctttctcttctgcttgcgcattaaagttttaacaggtaagtggtgtattgaatatttcttattaagttataattcaagtaaacattaagaaaaagcaaaggtagaaaaattacgcacccaaaagacagtggttttggtttttgaaagtaggaatagtttcaggatatggccaagggcaccatgtcactcatgtcactgtggatggcattgagtttgcattgctgcctttgatactgtgtcttgagatgaaaaacatgtttcatcagaccattaaatttttaaattacctgcttggagttacctgtcagtggataaactagcagagtggcttactgttcttagagaaagatgaaaggcaaaatgacttgtgtcaacagaatgaaaattaaatagctctggcatttggactgggaattctttctgtggtagaaaataaaatgggaagtctttgaaaagaaggattttgattttaatcttacctggatgatctgttatctgaaatgtccagggcaccatagagtttttattgacactaagtatcagagttcaccctaaaaagccaaggaggaaaggataatgtaaaaatacttcctagcccctgtagaccttacaaaaaagatcattctggagtccctgattccttctcttgaatggcatatagcagactctatatggacaatttaaataatgctacatacaatgtaagttaatacacgtgtttctgctgctttttactgtatataatttgtactacttttgttttctctttcacactgagccctattcttgaggttgaaaaaaggaaagttaagtaatattaaataacttaaataatcaaataaactaaaagtgaaggcagaacttttagtaggtatgatcctatctagggatacattttttcagtggcaaaaaaatagaccttactgttcttacaaaaaatgaaaaaaaaatgaaatcaaattgatcaaatgtttcatcttgtgctggctcaaagtgagttaagtgcagttaagaggattgaggaatgtagaatgagcacaaggacagttttgggctacttgctggtttatgccttttctagaatctcatgaagtcctttagcggcatgaatgacatgagcagctttggaatttatattcattcttcattcatccatttactcatgtagcattgagcacctgcctggtagcaggtactgtgccagatggtgtatgtacaaggatgagcaaaaccaggtcaacccctgttctttggaaggtaactgcatggtagagagagatatattaatcaaataatcccattgattaatgataattacaggcaaaactcaattatatgagggaatgtaacaaggagcttgactagactgggtgggtgtggaggtgtagctgaggagcagggttcattgaagtctttcctgtgcaagtggcacttgagcggagatttcaaggacaaggtagcaatcaatggggagaacggtatgaaggtagggaagaacgttccataccatggaaggaacaagtgcaaagagcctgtggcaggaaggaatgaggtaaggttagggaactagaagaaagcagacagatgtgcctgagcacaaagagggaagaggctgagcttggtccaagatgaccaactggtccaagttggtccaaggtgaggctggaaaggaaagtagaggccagaccattcagaccatatagtctatgttccagattttggatattcttccaagaacgttggtaccattcgtggaagggtttgtttgtattgataaaaatcattcaactaggccaaaccaatttgggcagttctggttgtggtattatgctcaggagaattaaagtagcatcggtgtcaattctgtggaaggtgagatccagccttaggtaggattgttttaagtttccagattaagctgacgaataatttgtattctggaacaatattcatcgtagattctaaatgaatacaaccaatgttcactctcattataaagaaagccatgagatgtggcatgctgtttggcatgtggcaaacctgaggcacgagtggctaaatggtaacaataaatctgctagcaatgatcctatttaaaatatctccacaatgcatgtatccagaaactgccatgtaaaagctctaaagaaaaagagccaaactcaagtaaactaagtacttgcttgtcctctgttgtattttcaatcctcccaatttacataggctttctcatgccatgaagatgtaggcattcttacctttagtcagtgtttgaagaatttccaaccaggaaaggttaagtgatttgttacacagtagttggtggcagaaccaaagttagaactctaatgtgactccaacatctacattctttctaaactgtgttgaagtagtggaggtgtaacataaatctaaaggaacgtaaatctcaatgattctgatcacctttgttatttggttgtgaattaagaaggatgggaatcttgctgatttctagtctttgatggatctcaatgtagaatttaacaaagtcttgtttttttttaatgaacttggagcaataggacacttttaattataaaaatatctacgaaaaatgtgaatgtctaactacattttgaagaccctctttgtagaccttataggcaacagggaccatatgagtgatgggacaaattctggttttagaaagactactttaaaagcagtgtggataatacaccagattgggaagggctgatggcagagggtgtctaataaacgtgcatgtattatgatgtgttctgtgaggaagctgggaggatagccctcaaggccactttgagccttcctttgtcactgaggcattccattagtgactcctgaattccacttgggaaaagagcccctcagtgtctccagcgtctgagagaagtctgtgaagatgactgaccttggagcccctcttagcctctccacgactgagtaaatgtcatctcctgacagcacccccttccagagtgttcttgttagatttaacaaaaatcccagttgtcaattttttcttttgatagatgaattcaggccattcccagtcagcataagcctctacttgattttatttctatgtttatttactacttatttttctttgttgtatcctctttttctcttttatttttgttggtgtgatgaaatttcttttgactctcctctttgcctccggttaatttggaaggtcgactacagttcttaatttactaagtaattgacatgttcaaagaatcttaattgaatgtctacttgtttatcattgtatgaaaataatgaaaatgcctttgtctgatgtgcctagtccccatcccctgcactgatatgagaacttaagaatgttcttcctttcccactctcacacttcccccagacagtgcaccctgctccatacgtgggttttgtggaaataatttaaaacttacagttgcagatcattgctaggtttcctcttacagtatttctcttctgtttcaagaatcctttcttaacacttacatcacatacgttcaatgacaacatcattctggacatctgctcctgtcttgtgatctctgttctaatctaatgatcagaagacttctcttattttcgttaaatacccccaactctctgaattccagtacaggtaagggtgtcttccttttaccttgatgagtgactgatatctttcctgggaataggagtcctggatggcagcctttcttcttagtggttgcagatattcctccactgtctgctggcttctagggttgtgggtgaagagtttgatggtagtctaactctcattcctttgtaaaaaaaaaaaaaactctagaatttcataatcttgaaagctatttacttcagtattggaattcaggaattcctccaggatatgtgtaactctctccctctgtttctctttctgtgtgtttctattaattttttttttgaggcggagtctcactctgtcgcccaggctggagtgcagtggcgcaatctcggcttactgcaacctccacctcccgggttgaagcgattctcctgcctcagcctcccaagtaggtgagactacaggcacccgccaccacgcctggctaatttttttgtatttttcgtagagacggggtttcaccgtgttagccaggatggtctcaatttcctgacctcgtgatccgcccacctccgcctccgcctccgcctcccaaagtgctgggattacaggcgtgagccaccgcgccccgctgttctattaatttattattattttttttaagactgggtgaaagttttcaatctctagactcaagctttattcttcatttcagtcatttttttcctagtatttgtttaatcataccttatgctgtttttccccactctttctagaaatgtctcttattcttatgtaagatcttgagtcccttattttttcatcatttgtgaacaaaatggctttcacaacttgctgttgcttgttaaccacaactccttcagatgaaatggatatttcagttttaagttactagtagcatattcccatttcttggtagaaacaaaatgcaggcatgtaggggggactgaaattcttatatttactcactgtaagattcatagcattatttggcttaaaaaaattcatcccagtattcacagttgtaaacagcaaaatctacaacatatactgcttccctactctaagaatattgagttttatatgcaaaatgacttactgggctttgcaaatttttaaaaatgagttttaaaatcatttgtagcttgcaataactgaagaaaagatcacaatttctctgtaaatggcatctcagtactactgctgttctaataaactaggtctgtcaaatggcactttttggtcattcaaagtgaaaaaaacatggcatttgaaaccttataaaaattcacaattatattttggaaagtggaacttaagtatgtaggggatatgtcacacaaattgaaagtgttagtcaagaaatgattttttttttcaatagtttggcctgtaaggttgaccaaaacaggtaaagatttgcaagtttagagagtcagaaactggggatatgaacttccttctggttcatgtataacataatgatgcttgtatctactttgcttgaggaaaaaaaagaaacacgttgtccccaaatagggtgatagaccaggagtttccatccagttgaccacgagtgttgttaggatctgtttatttgagtcatgttgacacagacacagcactttcaataagcaattaatgatcatttaaaggtaacttttttgaatttgataaatagattttttttacagcctgtatttgtgttcttctaggactttgcaacaaagaatctgtacatgcaaaaacaacaataacaacaacaagctgtctactgcactcacagttaaagttctgtttactttgcactatctaggactaatgcaaaaatctcatagatgtgcctatttgcacttatttaattatgatgaaatttacttctatatgtgaatccatttctgtacatttctacaggcagataagtgatgggaaaatcattaagaatttagacttcatcagagaagaacccaggtacaatgacagcccagcttaatacatgatggctgatgaatgaaaatgtctagggaaatgagtgtgttatgtacaatgtaatttcatatctaagtcactttaaaataattttttgatatataataaccctttcaatcacagaacacatatgtggcaccaatgtgaatactactttaagtattaaggtgataatatatccaatatacctagaaggaaaataaatacctgaaattcattttcatatctagcttaatgttaaaagcttctttttgtttttttatttcgtagcaaatctctttagctctgatgctttagtttctgtacaatgagaggattggactagattattaggtgaagagattaagtaagtgtgtgtaccctggtgtcaaattatcttattcttttttctttgtttttgttggactgggttaattcgaagaccttgtcttcaagctctgaatttctttcttctagttgttcaattctattgctgagactttccagagcatttcacctttctaaaattgtgtccaaagtttcctgaaatttttattgttttttctttaagctatctatttccttgaatatttctgccttcacttcttgtatcattttttgcatttccttgcattgggcttcacctttctctggtccctccccgattagcttaataactaacctcctgaattctttttcaggtagatgaagaatttcttcttggtttggatccattgctggtgaactagtgtgattttttgggggtgttgaagagccttgttttgtcatattaccagagttggttttctggttccttctcatttgggtaggtgctgtcagaggggaggtctagggctgaaggctgttcttcagattttttttttgtcccatggagtgttcccttgatatcatactttccccttttcctatgtatgtggcttccagtgagccaaactgcagtgattgttgtctctcttctgggtctagccacccagcaaatctacccggctctgggctggtattgggggttgtctgcacagattcctgtgatgtgaaccatctatgggtctctcagccatggataccagtgctgttctggtggaggtggcgaagggtgcaatggactccatgagggcctttagctttggtggtttaatgctctatttttgtgctggttggcctcctgccaggaggtggcgctttccagaaagcatcagctgtaatagtatagagagggtctggtggtgggtggggccctagaactcccaggattatatgccctttgtgttctgctaaccagggtgggtagggaagggcagggctaggcatgtctgagctcagactctccttgggcaggtcttgctgtggctgctgtgggggatgtgggtgagattcccaggtcactggagttgtgtacctaggaggattatggctgcctctgctgagtcatgcaggttgtcagggaagtgggggaaaaccggcagtcacaggtctcatccagatcccatgcaaacggaagggctggtctcactctaatcatgcctcctctaaccgccccaagtctgtttccaggcaaagggcaagactggcttgaaaacttgcctgaggctttctgcctcccagctgtgaaagaaaagggctttagtttttcccctgcatgtgaaatctgcatgctggattcacggcctccccccagttcaggccaggagacttcttgccctgttcaaatagttacaaagttcagctagagaattccttctccctgtggagttttataccctgctcctctggccaccctccagatggatccctgtggtgcctggcaagaatgggctgcttggggacccattgagctcccagagcctttctgcagcttcctctacccctgtattttgctccgtttggctctctaacttgactcacctccagataaagtcggaaacttctccacaaacagacgctcagcttctccggtcagagtgtgtgtttgggagaggagggtctccctttcccgtgagtcttttctttttgactgggaaataagtatctcccaatcttcagtaaataggatctttgctctccttttcccactcctcttcttggcccattacaaagatatttaccaaacatgcttagcctttatattcttctgttaatattaattcttttatttaatatgattgagcttccactatgttcaaggtcctgggattttttaggcaactgtaatgcagtccttatctttgtggagctcatggttaaatgaggaagacagacaaaaataattatgatccaagatgctatgtgctaaaatatactggcctaaacaaagtattattgggagcatagaaataagagtctttgtctggtggtcttggaaataaatatctcaagagagaagttgacatttaaaatggttcttgaagagtgaatgagaatttcttctcagattaaggggtaatcaaatattttagttcatggtaacagaaataatgaaatgtgaagcatattctagtagtaaagaacagaagtgtgaaagaaatggccaaaaagttcagtgtggcttcaatagatggcctatgagattgtgaaagcattttgtgtcaagccagatatatatattttaaaacaccttataagcaatagaacactaatagagacttttaaactggggagtgaaatgcttttctgaaacataattttgggagcagcatggaggagggatggggaggagagagatcagtattgagaaggccagtcaagaggatgcttccacagataagggaagacatgaaaaaggtgtggattggcaatgggaatggagaaaaagaattgaatttaagagatattcatgagctggagtcaactggacttggtgaccaattggatgatgaaaatcagagagaggaagaaatgaggaagactctgaggttcctagggtcagactagtgactccctgaaaagacagggtttggatttggtgaatgaatacagtcacgtgccacttgacgatgggaatacattctgagaaatgtgtccttagtgattttgttgtgtgaacatcatcgagcgtactgacgcaatgatgtctactagatggcagagcctactgcactacctaggctatgtggagtagcctattgcttctaggctacaaacctgtacagcatgttactgtactgaatactgcaggccatggtagcacaatggtaaatatttgtgtaactaaacacataaaagggacattaaaaatttctgtattataatcttatgggaccgccaccatatatacagtccatcgttgaccaacatgtcatttatgcagcgcatgactgtactgagctcagtttggaaaggctatacatgatgtgttagggtaaaaccagatagtgatgttgaaaggaatttggaaacaaggaactagaagtttgggctggagagaaaatgtgggctcctgggggtagacatgagagctggagccataggtgcaaatgagttcaggcagtgaacaccctgtccatgtgcccaaggagttttgcacagtagctgagcaatggcaagcaatgtgggtattcagaggtgtggataaaatcctctctccctcccactctgtggaagagagttgggttcatttaatctcatatgatttccctagtacaatagtttcaaatcaaaggcaatgaagtaactaacaaaataacttgtttgtaaattaattgctttgtgaatattgatacaaagttttataataccactgggattttttcatttttcatgaagaaatcagttttaactaggagaaaatcaatctttcatttttcttattatacacacttagagaaccaaagggttgttttgtaccccctatggagttccttggagagtaaaacaatgcacacattgtgtgtgtgttcatgagcactcttttggctttttctcctcacttttcttcttcccatttttttttttttgctttcttttttttttctccaaatgttaggcatttaggttagattgggtttatcttgtctatcctccctcccttccttgcctcaattacttctttagattatgggtgcctttgaatagcaatgtaagtttagaaatgatgcatatataaaaatctactaaccagggatctaaaggttttagctggtagactcataagacatgacattgcttttatgaaaggtgagaaaagtggtaggaagtacttttttttttaatgccagaatttcttagtaaaacatcaaatataactaaaacctaatataaacattgcaatttttagacttttgcctcttgtgtcacattcatgtgctgtgctaagctaacacttatcattgtttgattacagaaaatgtgtttaataagcactatcaatgattacaaactcaggacatcttatctttccatcactctgagacctttgtggaggtttgtggttagaagtctgagttaaagaaaataaaattacatttctgatatcttgcacgctctgcactgagtgggttctttaaatgtttcctccagaggattttcaaccaggaacaatacaactgcttgcaaagagtcccagcaggatgggtctgggcatgagcatcttatactggtgaaatgaagtagtccagatattaaaagcatcaacttgcaaatgaactcatctgcactatagtgcaattctcaggtgaatgaccttttcttcagaaattttcttaatagtcccccaaaagaagaagaaaatgttcttgtgctttataaattttgaaaacctaaagagatcacttaatataaagatttttattttactcttgaaaacattagtctattgatatcaacagtaatattataaaaattattattattattattttttgagacggagtcttgctctgttgccaggctggagtgcagtggtgcaatctcggctcactgcaacctctgactccctggttcaagcgattctcctgcctcagcctcctgagtagctgggattacaggcacacaccaccacgcccagctaatttttatattattagtagagacggagtttcaccatgttggccaggatggtctcaatctcttgacctcgtgatcctcctgcctcggcctcccaaagtgctgggattacagggcgagtcactgcgcccggcctataaaaattattgttagcagcagttaacagtcttgagcctctactgggaagaatatgccctgttagacacagtattctatgtgatgaagaaaatatagtacctgttctccagactgattataatctagggtttccaataaaaagtaaacagatatggtagcaaaacaaaacctcatgtttaatattcagattttaagactcatcaccaggatccaagaccacatattcctttttgtgattttagtaacatattaagtgctaaaagatataagatgatgtttatatcacaaaccactaacatgctgtgtttataaaacatcttggtatattagaacaaccattggtccaggggttcttgtcctggtcatatattgggcaaatgtaatggctgcgctttgggacatccaagtgagcaaccaggtttgttgctcacttggatggaacaaagttgtcctgccctccacagacatataagagccaagagaattatcaactgtctaaataagtatttatgaacccagtggatatttgaaggtaaagaaagtttttctttaaagctcagacagataatttccattagaacatgacatctcagttggggtagtgtcttgtatgcatgattgtgtatcttcatacacttgtttccagaagaaaagcaataatatggcatagctaactctgggatcatgccccagctatgagctatgtaatcctgggcaagatagtcaccttttctggctctagtttaatttgataaatgcaaatggaaaatgcaaaatgaaaggtttaacttgtcatttctagaagcccttttggctcttatattataaatcctgtgcttcatctcctcagatttaaaatgtcaccgtctatatattcatttgttcgcccatccaaccatgctttcatccatccaataaatactgattgcagcttacaacacaccaggtattattgtagatacttgggatggatttgtgaataagaccaacaaggtccctggttttaaagcttagagtggagtagccagacaataaagaagaaaacaatcagataaaccagataatttcagacagtgataaatgctttatgtcagttaatgtactagataatgacctggatatattctttagattgggtggccagtggtcactgaagaagtgtcattactcttgaacgatgacaaagaagcagccatgtgaaaatcagagagaatgttctaggtggagaaatgagaaattaaaagccctgggaacctgctttgtgtgtttgaggaacagaaagaagggcagtgtgactgtggtgtagtgtgtgactggtataaaatggggagaggtaggagaggtcatgcaagtcatgggaaaccagggtaagaacttagattttactgtaagtggaatgagaagcacctggaggttttataagcagaacaatgactctattggattatgcatgtaagaaggtcattctggtttctctgtggagaatggattgtaaatgggcaggagtaaaagcagaagctcttgtagtcccagagagagatgacaatggtttggaccagttgaagctgagatggaggagaagtggatagattctgttggacataaaacagaggtgctggaaattaggcgttcttcctgctcacagatttttagcactggtcctgtaacactcagttgttagtgaccactgtctagcttcctgtggttgcctgcttctattatacttctgttgattgttgctagtgacactttgactgtggattgaaccaaaaatctttcatgcacccaggaagctgtgtgacctcgggcaaataatttaatctgtctgggccttcagttgtctgtatgtacacaaaagaggtcaccagatctgactgtgtatgatgctgagaagaggttgaatcatgttacaggaaacaaaaagtgtaaagctgagggtatttataggatgcctgaaacatgaagtgttgatgaaatttattagcaatggaaatggtatgttaggaagcatgaggagcatatcaaagatagtatgagagaggatgttttggagaagattttatattaaaggtggtatgggaagaaaaggcaaacatgagaaaaaggaagaaagaacaagaagagagagattggtaaggggaacactgacaatttttaactactggtatggcaacagaattgaccaaatagatttgacaccttaccaatcagagcagacactatctataaaagtggtgctatctatcataccagcattccaggctgagtattagacttggagataagaacatccaagaaggatggagaaaagatcctagatgcttttgcagttataagaaactaacgtattcagatcttccttaaattgtctatccattaaatgctttagtcatggttataaggggcagtctcctttaatactattttcaaatgttaccaaaggctaagaagaatttgtaatttgtcatttgagcattgtcttagtccattttctgttgctatcactgaataccggagactgggtaatttataaagaaaagaaatgtatttcttacagttctggaggctggggcctaagtctaggggtctaggggcctaggtctaggctgaggcctaggggcgaaatctggtgagggccttctttctggtggggacactcatcagaggcccaaggcagtacagaggattacatgatgaggaggttcttgagagacagccaatctggctgtttataacatactaactctcatgataattaacccactcctgtgataacctattaatctgttaacccattaacccatgaattggattaagctattcatgggggttctgccaatcatctcttaaaggccccacctcccaattctattacactggggattaattttcaatatgagtgtcagtcagagggggacaaacattcaagctatagcaagcatatctgttctatatctgccaaaatagttatgaaataattaattaaatgctatagttaaaaacattcgaactgcagacttagagctgtcaagcggttttccagatggaaagtttaaacactggatatgtggaaacctaagtcagccttctgatcactacatttcataataaataggcgatccaggtagtttttaagttaaagataaaaaaatgagtaattaagagcgtccaggccaggtgcggtggctcacgcttataatcccagcactttgggaggccaaggtgggcggatcgtgaggtaaagagatggagaccatcctggccaacacggtgaaaccctgtctctactaaaaatacaaaaattagctgagcatggtggcatgtgactgtagtcccagctacttgggaagctgaggcagcagaatcgcttgaacctaggaggcagaggttgcagtgagctgagattgcaccactgcactctagcctgctggtgacagaacaagactccatctcaaaaaaaaaaaaaagagtgtccaatagaaatgacactctgaaatcttcagctgatgtcagtggcacacactctcaacatgccattcaagaaaaattgaggcacggcattcctggtcctacctaaatacttttgtgggcaagaaagacagtctcctttattttaatttattctgactttctggaatagcccattatgatattgagacagaaagtggttaacaggaacattgttttccctttggaagacttacccaacagcaaagaattagctctctcagttgtttgcagtcttatctggatatattctgatgctgaatccagagaaagcaggtgttagaaataacattaagatgtttttgtttcacttcttcatttcacggatgaggaggctgaattccacaggggtaccctagccacagagccttgctagtggcagagccagaatttgcctctggtttccttgggatccactgcaatgcacttccaccacactgcaccgccaaccattcatgtcctcttgtgtttgccacagtgcgggcacaatgggggaaaaatctgctgagaaaatcatcttcggaagtagaagacaatgcgtctatgtctgtgtatacatggtgaccacagacgctttggctccaagatcattgtggtttacttgctgccattctaaagtctctgggaaattttttgtgaacatttctaaaggaactgagaacccgtccactgattttatcttctgcagcagacggtagagacatacgcatcaaagcaacagtggggcaacatattttactgtcagacaaataaagccccaagcaaaataccctacgttttaatctaatgtagactgcacctgttctcatgccaacagtttttttttctttgcctctggataatattgttccttccagtttttaaaacgaagcaagtattattttccttctgtatgcttttaaacatacttgttattataaaacaaaacatacatatagaaaagtgaaaaaaatgtataatttaatgaataatgctaaagcatactatcttaccctcataatcaccacaggtcaagaaatacaagactgtcagcacccctatttccttctgattccaactctttctccctctttagacaaaaccattaggctgaattttgtgatactaattcagattatattaactatttctattttttagtaattatggaagaaatcaaaacatgtatacttcacttagaaaagtttcaaattacatataccttcactatctttctagacaatgtgctctatattgacagatgtttcttttagcacattggaggtatatgttataattccactgtatcagggcttttattgttgatgttgaaacagtctaatagttgctccttggaaggtaatcagtctcttttctctggctgcttttaggattttcactaagatacatctaggtgtgcatacttttaaaaaatatgcttgtgaattgttgggattcttgaatctgtggagtgtgactgggttctaactaatttttccaacctatctgctggttcaccaattttctctttaactctgtctaatatatattaaacttatctattgagttttaaatctcagtgcatttttttggccgattcttgtaggttctttttcaaattagttgacttaaattttcctgtgtactacagatattattacaagtttttctcttatttgcttaaacataataagcttaattactttattttggggacctgataattcaggtatataaatcatgagtttgtttttgtagtttgttgtttctgttgttcccttgttttcttgtatgtctcattatttttgtgatgtgtttgccattgaatgtgaatattatttgtatgaaattttttgaggcctaggatgtaaaccttttcttcttgtaatagtttgcatttttactttcaaaagctgaagggtaataataatgcaaatctccttaaagaaaattcaaggattgaggttttctaaccattgaagtccagaagatttttctggaccatctaatctgaatgaggtctggtttatttctttacctgtgctccaagaatgtaactctttggggtcccaatttattggggagagggttttctgctagatcactcactctgcagattctgggagttgagacataaaaacaaaagtttgaatttgaaagaacagcaatgctttccgagtaaaagcagcttccaagctttgcctgtctctcggggttctggttctctcttcaaatttagcctggtaatttctcctcctttgtgtcattctttaatgcttttaataatatttttggacatttgttcaacatttttggttgttttggcgtgagaattagtttgaataatagggactgctataactgaagactagaacacttgtgcttattttcacaatcaaatcacccaaattgaagatatatagggaaaatataaattgaagcccagggtcattaagaaaataagtaattgtgtatcttaaataaaattaaggcaactagtgtaagtagaggtgtgacaaatagcccctcctgcataatgctaatcctgttacaaatttcagaaagcaaaatggcaatacatagtattataacttttaaacattttgaccaaatgtcataatatttacataaaagcaaaatgctgaaaataatcccaatatccaacgttagtattttagttttaacaaattatgatagattaacattttggccaataatatagtcattaaaaaggataattatgatgactaaaaatgaaatgtttatgacataaaataacaatagcagaacacaaaataacatgtttgctataaataataagtatgtttttgcaagataaagagcaaaaatatacaaatagtatttctatttcactgtagaactaggtaatttttttccttaaaatttttttacacttacatagttttctcaaaaacaaagaccaagatttcaaaacttaggaaaaaaccagcatactaataattttcccaaacaatttcagcatgaaaatttgtcatattaaaaaggaaaataaaacaaaaagaaagagaaggcaatgagcagtttgaatttatagtctaataactcagaatctgcaaccaccaggccaaggtgatttcagttttttccttctgtgattcccatgtagcttgcaaaaacaaccttggcttcctataagcataaatttatttcagaaaatgaaaaagtggggctgggcatggtggttcacgtctgtaatcctagcactttaagaggctgaggcaggaggattgcttgaggccaggagttcaagaccagcctgggcaacatagcaagacctgtctctacaaaatttctttttcaaagttagccagatatggtggtgtgtgcctgtattcccagcttcttgggaggctgaggcaggagggacccttgagtcaaggaagtggaggctacaacgagctaggatcatgccactgcactgtagcctggggaacagagtaaacccttttctctgaaaagaaaagaaaagaaaagaaagagagagaaaaagtaaacaaaaatctggggctttatctttattatcaggccttgattcagttctcagtggatgaggtttggagaaaatacatttctgtcatttgaaaatgattagtctgttcttttactctttagcaggaggacataatgtatgtgtgtatatatgtatgtatatgtatacaattatttgtatatatacacacacatagtctctatatattgtaatatacatatacatataatacatatattttaatatataatatgtaatatacatacatatataaaatatatatacaattattcatttttaaactacttcgtacttttacaaagtgagcaatttctatctttccttttatctgctttactgatgtacatcagtgattatttactcatcagaagtacacatggttcttgtcagagtagtttgatcaacaggtagacaattccttctccccaagatatacctactaataaatgaagtttttcctaaacttcaacttttcccatatctctctgtttagctaagtgctactaatcctttaattccaattttaaaactcacttcctcaaggcggcattttctgattctataatcaaaattataacccacctgactctaccaccttcatttaaatagtactccattcctatcacaaattatgttgcattactacatatttattcctttaccatctgcctccaatatgaaagctaccaaaggacagaggccataccagtttgattcatacacactatgtaaatatattatttaatatttagtatattctatattcacatatgacaagcaagtttctggttaggatttttttttctctaggacatagttttatcttatgttcttccttgaggggtggagggagaatgtgaagctgtttcattttggtgcaacagagatgactttatgcattgaataaattgcttttatgttaaaatataattattagggcaacattataaaatgtcacttttgctttgttttctttctttttatgcaggagaaatcaatggttctgccaattatgagatgtttatatttcacaacggaggtgtacaaattttatgcaaatatcctgacattgtccagcaatttaaaatgcagttgctgaaaggggggcaaatactctgcgatctcactaagacaaaaggaagtggaaacacagtgtccattaagagtctgaaattctgccattctcagttatccaacaacagtgtctctttttttctatacaacttggaccattctcatgccaactattacttctgcaacctatcaatttttgatcctcctccttttaaagtaactcttacaggaggatatttgcatatttatggtaagacattgctttcatcttccaaacttaagagtatatatatgttttgacaacttttctcactaataaaatcaattagacaaataaatatcttttgtgttggagttcacttagatgcagttgatggtaatcatttataatgaagatatacaggtgatgatttactattaatcataattagtattattcagcaatatgcaatgtaatcccatagactgctaagtcagaaatagatcatattgccttttaaacacatatgctattaaaaatcaggaaaaacattaagacaaatacttaaacttatggcttaataatgggtattatctctattcacctaagatttaaggtttggttttgcactgtgtttgtggaatgaagtatgatgattgaaaatcatagttttataacattacttttactattacctcttttataaaaatataggcagaaaagccctttctattaaccacatttgtaaatacattatatgcataatcttttaagttttagttcctggatccttgccataatactgagatgatgttagtctaataacttgcccacttactggatttcatgactataataaagaaaagcttcatttgattaaatagctcttttaaatttggtaagagaacttgtggttcagcagaatttttcattaacatacctttttttccaatccagaatcacaactttgttgccagctgaagttctggttacccataggatgtgcagcctttgttgtagtctgcattttgggatgcatacttatttgttggcttacaaaaaaggtaagcgatttctatctttccttgtatctgctttacagatgcacatcagtgattatttcctcatcaaaagtacacatggctcttgtcagagtaatttgaccaacagggagacaattccttccccccaagacatacctactaattaaactaatcacttggaacagaaatttatgtatttgttttatagcccacacattccaaagaggacttgacttgatggcttacagagagttacattattattattattgttcaaactagatgaggaaattgaggtcaagagaagactaaaggtcaggaggaaggttaaaacatcaaaatagatgactctgatttttaaaaaattattatgcatgggctgcgaatttgaatccaaggttcctgagaggcagggcagagatgaaacaattagttataagttttgcttagctggtaagttaaaaacagtcagcaagaaagccttctaaggtgtcaattgtagctgagaaggaaattgacaacttttttacatggtaggttattagactccttgcttttaaagaaaaccactgaggagctatttagaaagataaacaacaatgacaacaacaaaaatctccctgtgctgggggatattctttttggtctcttgcattacaggttctcaatcaaagaactgacaccactctgcatattacgcgagtatgctagtactcaagtatatccacagtgtggtcattggccagtgtatatctgtgggagagtggaatttggaaagagacataaagaaggaagagaatgagatagcgcccatggtctaagtctgctgggaaagaaacaataaaggcaaaaacgaggaagaaagttcagtagaaagctctttttatgtaaagcccttttcatattgtttttctacttagcctaaagccaggaacctaagtcacattatcatgtttttgtcacataccacttcaacaaagaatagaaaacagtcaaaaaacaaagagatggagaagaaaagatgaccaagcatgtttctggctttttctttcagaagtattcatccagtgtgcacgaccctaacggtgaatacatgttcatgagagcagtgaacacagccaaaaaatctagactcacaggtatgactccatttgggggtttgggaagggaagaggtttcttcacagtaagcctggaatgttaatttttttttttttaattttaaaggaaaggaaaacatctccaaggcctaattctagaattttctgtgaaaatctggatttctcacttttaactagatttatattttctgcagtatattgaaaacaaacaagcaataggtttgtaagccactattgaaactaaacacacaaacagctcataaaccaccatagtatcaaggcaattttcccattgatgtttcaaaagttgggatgattctaagtgttttttgttgaagggttcattcagtcattcaatgagcgtttattgagcatcagttaagtgtgagttactgagtgaggcactctggggaatttggacagatatatgctaattttggactgagattaggaagagagatctgtgctggtactgctagagggaagaaggagaaattgatgaagatatctggttattttgaggtaaagagtgtgcaagtttagagaacttggatggctttagaagtctcagtaacatggaaatttgaccttttctgttaagagtcagaaaactgaaagttgccaagtttgaggagcacccagaaagtttgaagcttccattgtggaaaattcatgtcttatgcccttgaggttcgaatgatgtgcgatgtgtaatgagacagaagccactgcatttttccacccctcagtggctacagattatctaaaggggacacacatagcttgcgttgtcatggaattatagcatgggatgggagctaaaaaggatccttgagttcacatttcatgttttagatgacagaaattgatgctcaaagtgttcagtgactcttttggttccctagacagttaatacctagctttgacacttgcaaagagcttatgtttcattactttgctgtttaaaaaatatatgatctctcaatctctttgcttaatgtgttctggctgtttggatccccacaagcagaacctgacataaggacttgggtgcaagtagtttatttgggaggtgatcccaggaagaaggggtgagggggcagggagagtgagacagccaacaaggagaagcaaatgaagggcgcattattatcaaggtctcagctccaggccacagaggcctgacttcattggacctctgagaagtgtacagatgcctcccagaatcattctcttgaaggatggcaaccactggctccatcctcactgatttggggttgcctgcggagggcattagctttccctcatctctgagctgtgcctctacttgggatgagcctacttgggatgagtcttcagagaaagtctggaggcagaaaagcagtgaaatgcagtggggctgttgtgctagaacagtcagcccatgcagcgctttctgccccagcagcagctgcaatcagaggtggacagtttcaaagtgatgagtttagataatgtctgttataggagtcgagagctaaacttctctggaaatggggaactggtgctgggtgttgaagcataaagatgagtttgcatggtgtgtgtgtgagtgtgtgtgtgtgtgtgtgtgtgcacgtgtgtgtttgtgtgtatgaaaggcaatggagaggggaaagcttcttgtagggaactggcacatggagagcatttagataatttatgctgaatttttgttacagatgtgaccctataatatggaactctggcacccaggcatgaagcacgttggccagttttcctcaacttgaagtgcaagattctcttatttccgggaccacggagagtctgacttaactacatacatcttctgctggtgttttgttcaatctggaagaatgactgtatcagtcaatggggattttaacagactgccttggtactgccgagtcctctcaaaacaaacaccctcttgcaaccagctttggagaaagcccagctcctgtgtgctcactgggagtggaatccctgtctccacatctgctcctagcagtgcatcagccagtaaaacaaacacatttacaagaaaaatgttttaaagatgccaggggtactgaatctgcaaagcaaatgagcagccaaggaccagcatctgtccgcatttcactatcatactacctcttctttctgtagggatgagaattcctcttttaatcagtcaagggagatgcttcaaagctggagctattttatttctgagatgttgatgtgaactgtacattagtacatactcagtactctccttcaattgctgaaccccagttgaccattttaccaagactttagatgctttcttgtgccctcaattttctttttaaaaatacttctacatgactgcttgacagcccaacagccactctcaatagagagctatgtcttacattctttcctctgctgctcaatagttttatatatctatgcatacatatatacacacatatgtatataaaattcataatgaatatatttgcctatattctccctacaagaatatttttgctccagaaagacatgttcttttctcaaattcagttaaaatggtttactttgttcaagttagtggtaggaaacattgcccggaattgaaagcaaatttattttattatcctattttctaccattatctatgttttcatggtgctattaattacaagtttagttctttttgtagatcatattaaaattgcaaacaaaatcatctttaatgggccagcattctcatggggtagagcagaatattcatttagcctgaaagctgcagttactataggttgctgtcagactatacccatggtgcctctgggcttgacaggtcaaaatggtccccatcagcctggagcagccctccagacctgggtggaattccagggttgagagactcccctgagccagaggccactaggtattcttgctcccagaggctgaagtcaccctgggaatcacagtggtctacctgcattcataattccaggatctgtgaagagcacatatgtgtcagggcacaattccctctcataaaaaccacacagcctggaaattggccctggcccttcaagatagccttctttagaatatgatttggctagaaagattcttaaatatgtggaatatgattattcttagctggaatattttctctacttcctgtctgcatgcccaaggcttctgaagcagccaatgtcgatgcaacaacatttgtaactttaggtaaactgggattatgttgtagtttaacattttgtaactgtgtgcttatagtttacaagtgagacccgatatgtcattatgcatacttatattatcttaagcatgtgtaatgctggatgtgtacagtacagtactgaacttgtaatttgaatctagtatggtgttctgttttcagctgacttggacaacctgactggctttgcacaggtgttccctgagttgtttgcaggtttctgtgtgtggggtggggtatggggaggagaaccttcatggtggcccacctggcctggttgtccaagctgtgcctcgacacatcctcatccccagcatgggacacctcaagatgaataataattcacaaaatttctgtgaaatcaaatccagttttaagaggagccacttatcaaagagattttaacagtagtaagaaggcaaagaataaacatttgatattcagcaactgaaaatacctcactgtgttttcttggggggagcagggaattgattaccttagctagcatgtacaaatttgacattgtacttgaagatagttacattgcttggaacagttgctttctttcttttttttttttaaattttgaaatagccacaaacttataaaacagttggaagcacagcaaaaggactgttcttttcctgagtaagtttctgatctaatgtcctatcacctttgaatggtattttttacaaacaagaacactgtccttcctaaccatagtatagccttcagaaaattaacattgatacattgctaccatccaatcctcagagcgccttcaacattagccctgtgcatttagttgatatgtttcatgcgcgtctgtgtgaagagaccaccaaacaggctttgtgtgagcaataaagctgtttatttcacctgggtgcaggtgagttgagtccgaaaagagagtcagcgaagggagatggggtggggccgttttatagaatttgggtacgtaaaggaaaattacattcaaaggggggttgttctctggcgggcagagtgggggtcacaaggtgctcagtaggggagcttttgagccaggatgagccagaagaaggaatttcacaagacgatgtcatcagttaaggcaggaacaggccattttcacttcttttatggtggaatgtcatcagttaaggcaggaaccggccatctggatgtgcacgtgcaggtcacaggggatatgatggcttagcttgggctcagaggcctgacattcctgtcttcttatattaataagaaaaataaaacgaaatagtggtaaagtgttgggatgtcgaaaatttttgggggtgatatggagagataatgggtgatgtttctcagggctgctttgagcgggattaggggcggcgtgggaacctacagtgggagagattaagctgaaggaagattttgtggtaaggggtgatattgtggggttgttagaagaaacatttttcatttagaattattggtgatggcctggatacggttttgtatgaattgaaaaactaaacggaataagagaaggagaaaaacaggtattaaaggtctaagaattgggaggacccgggacatctaattagagagtgcctaaggaggttcagcatagccttgccagtaaagattatttatttacttcaagagctaagagtggcagtttggggatagcaccaggggatatcagctgtgatgacttggagaaacagtgtaaaccggcagtgtaaacaagagcagggcatgtatgagtagctgagaacggtgaataggagtgtgactagacagaagatggtagggatgacaagtttttctggggcacagtctaagttagtctggtgtctggaatgagactggggcctaataaagaggagcatccatacaggagctcaaatgggctgtacgctgtagcattctgaggacaggtctgacttctgagaagggaaagtggtaaaagtattgtctagtcctttttaagttggtggctgagcttggtgaggtgtgtttttaaaagaccattagtctgttctacttttcctgaagactgaggaccgtaagggatataaaggtttcactgaatactaagagcttgaaaaactgcttggctgatttgactaataaaggctggtctgttatcagactgtatagaggtgggaaggctaaactgaggaattatgtctgacagaagggaagaaatgactgcggtggccttctcagaccctgtaggaaaggactctacctatatagtgaaagtgtctacctagactaagagatattttagttatctgactcggggcatgttgagtaaagctaatttgccagtcctgggtgggggcaaatcctcgagcttgatgtgtagggaagggagggggcctgaataatccctgaggagtagtagaatagcagatggaacactgagaagttatttccttgaggatagatttccacgatggaaaggaaatgagaggttctaagaggcgggctagtggctggtactgtagcatagcctgcctttgctggtgtgtggagattaggcctggtggaaccgccatcaataaactaagtgtgatcagggtgagagacagggaaggaggaaatgtggggaaatggggtgaacgcaggtggatcagagagatgcagtcatgagggtcaggtgtggtatcaggaataatgtgggaggccggattgaagtccgggccaggaacaatggtaattgcgggacttaacaaagagtaagtacagctgaaggagccggggtacagaaagtatatgcatcaggtatgaggaagaaaatagattttggaagttatgagaaatgtagagagtaagttgagcatagtttgtgattttgagggcctctaaaagtattagggcggcagcagccgctgcaaggagacatggtggccagcctaaaacagtagggtcaagttgtttggacagaaaggctacagggtgccttcctggctcttgtgtaagatctctgaccgcactaaccatgcctaggacggaaaggagttgttgttttgtaagggattgaggtttgggagattaatcggacacgatcagcagggacagcgcgtgtgtttttatgagaattatgctgagataggtaacagataaggaagaaatttgggcttgactgaagtaatgggggctgtctgtgaagctttgcggcagtacagcctaggtaatttgctgagcttgatgggtgtcagggtcagtccaagtgaaagcgaagagaggctgggattaagggtgcaaaggaatagtaaagaaagcatgtttgagatccagaacagaataatggattgtggagggaggtattgaggataggagagtatatgggtttggcaccacggggtggataggcaaaacaatttggttgataaggcgcagatcctgaactaacttgtaaggcttgtctggttttaggaccggtaaaatggggaaattataaggagagtttataggctttaaaaggccatgctgtagcaggtgagtgatagcaggctttaatcctttcaaagcatgctgtgggatgggatattggcattgagccgggtaagggtgattaggttttaatgggatggtaaggggtgcatgatcggtcgccaaggagggagtagaggtatcttatacttgtgggttaaggtgggggaatacaagaggaggatgcaaaggaggctttggattgggaagagggcagcaatgagatgtagctgtagtccaggaatagtcagggaagcagataatttagttaaagtgtctcggcctaataagggaactgggcaggtggggataactaaaaggagcgcttaaaagagtattgtctaagttggcaccagagttggggagttttaagaggtttagaagcctggccatcaatacccacaacagttatggaggcaagggaaacaggcccttgaaaataaggtaatgtggagtgggtagcctccgtattgattaagaaggggacggacttaccttccactgtgagagttacccgaagcttggcgtccgtgatggtctagggggattctgaggcgatcgggcagcttcagtcttcagctgctaagccaagaaggtctgggaaggagtcagagagccttgggccagagttccaggggctctgggagtggctgccaaggtgagtgggacagtccgatttccagtggggtcccgcacagatgggacgcggcttaggaggaatcctgggctgcaggcattccttggcctggtggccagatttctggcacttgtagcaagctcctgggggaggagcttctggaggaacgcctggtggctgcggttcaagcgtttggaagttcttgtgtgctggagatgtgtctggggtttgtctcacagtggaggcaaggaattgcaacttttttctattattgtacaccttgaaggctaggttaattaaatcctgttgtgtggtttgagggctggaatttaatttttggagttttatttaatgtcaagagcagattgggtaataaaatgtattttgagaataagacggccttttgaccttttagggtctagggctgtaaagtgtctcagggttgctgccaaacgagtcatgaactgggctgggtttttcatatttgatgaaagagtctaaatgctcactgatttgggagaggtctgataaataaaaaggagcattaaccttgactatgcctttagcttcagccacctttttaacagtgaattgctgggcaggtgggggaggactagacacggaacgaaactgtaagccggactgggtgtgaggaggggaggtgataaaaggattatagggtggaggagcggaggctgaggaagaattgggacctacctcagcctggccaggaggggagaggtcagatagatctgtagaaaaggaagattagaaagactcagtgacgcttggggttgggactgaggggacaagtgggagggaaagaaggatttgggacgagttgcactgggcacagagactagaaagggactgatgtgtaaaagaatgcctggacgtcagccacctcagaccgtttgcctattttatgacaagaattatttagatcttgcaggatggaaaaattgaaagtgccattttctggctatttggaactactgtcgagtttgtattggggtcaagcggcattgcagaagaaaataagatgcttagattttaggtcaggtgagagttgaagaggttttaagttcttaagaacacaggctaagggagaagaagtaggaatggagggtggaagtttgcccatagtgaaggaggcaagcccagagaaaagagagtagagacatggagggaaggggtttgggggttcttaccctccagaaaagcgggaaaggggtcggggcacagagatacgaggtcagggcgtggaaataagggattggggcacagagatatagaggttggggtgtggaaataagggatcgggtgcagagatataagaggttggggcatggaaataagggatcagggtgcagagatataaggggtcagggtgcggaaataagagatcggggcgcagagatacgaggttggggtacttgctcctcccctagaaaagtgggacttgccgctaagggtgaaggagaagtggtcgggggtttcttgccccccagaaaggcggagaaggggtagagacacagaaggggttggggtacttgcccctcccccagaaaagtgggacttgccgctaagcatgaaggaccaaggcaggcatccctgcgtggtctgacacctctgaaacatgggtgaataatcagagaggtgtccctgcaatgattaaacaccaagggaaggctgccttcccagtccgtgaccggtgccggagttttgggtccacggataaaatgtgtctcctttgtctctaccagaaaatgaaaggaattgaaattaaaagaagggagagattgaagtgtggtgccaaggctgaaaggagaaagaggttgagggatagtgagggaggttggagaagagagtaaaaagaggccgcttactggatttgaaattggtgagatgtttcttgggctggtcggtctgaggacctgaggtcacaggtggatctttctcatggagcaaagaacaggaggaccggggattgatctcccaagggaggtcccccgatccgagtcacagcaccaaatttcatgtgcgtctgtgtgaagagaccaccaaacaggctttgtgtgagcaataaagctgtttatttcacctgggtgcaggtgggttgagtccgaaaagagtcagcgaagggagatggggtggggccgttttataggatttgggtatgtaaaggaaaattacagtcaaaggggggttgttctctggcaggcagagtgggggtcacaaggtgctcagtaggggagcttttgagccaggatgagccaggagaaggaacttcacaagacaatgtcatcagttaaggcaggaattggccatctggatgtgtatgtgcaggtcacaggggatatgatggcttagcttaggctcagaggcctgacaatatgtttctgtagtgtccagtctggacagtttctcagtctagacttcacggccttgacacttttgaagattagaagcaggtgttttgtagaacatcccttgtttgggtcagtctgatgtttcttcatgattaaaatcaggttcttcatctttggcagaaataacacagaagtgacattgcactcttttaattgcatcctatcaggcagctcacagtttcgatttgttacattactgataatgttcattgtcatcacttgactaaggtggtgtgtgtcaaccttctccaccacaaagtaattcttgtcccctttatattttaataaagattttatgggaaagtactttgaaactttgtaaatcttctgttccttgtgaaaaattttatttatttgttcgtttatatctgtatggcatcatggcatcctactttattcaatagataaaaatttgttactatcattattctgttttgatactgaaattgccccttccttggccagcaggagcccattccaactgggtcttgtgttcttccaccatgtcctcaatgttctttcagcactcttgcttcctggaagaatgagctagtccatcctcagtttgagctttcactgtcccagtgctggaatcagctgcttctccaagagccctggtttctttgagagatggttgtagaagctaagacctaggcattagttctgctcattgctattggaatctcactgctcctaggtcctatcagtggacagagctagggatagatatctatccagataaatagataaatatgtgtataaatataaatgtagatgtaaatgtgtgtgcatatatgtgtatgtgtgaatacaaatatatacttatataatatgtataagcagatgtaaatgtgtgtatatatgcatccacatacacattagtctgcctctatatttgtctatcctacctagaaatccatgagttcacacccaagccattaattctgatacaacactacatggtgattcattctagtcttatccctttcttttatttatccttcttctgacagtgagaaacctcacttttagatccttactacattcattatttgatcaatcccctagtatgaaactcacctcccatcttcttcctcactccttccccacgtggttccctcctctctctgcctctgctctgacttctcattccaggctgcctgttcctgttacccactttgcccaggtggcactgtgtctccccttgctgggctctcccataccatggattcccttttcaccctgtttgggctccaacactccaggctgggtcattcctccttgaggatgctctccataccgtgcctgggcctgctcagggccacagtagatctttgggctagggtggatgatcctatggcttatgctttgcaccacctcccacagtgtgctttggtgataagttccattgcctaccatgatcactggctagatgcatgttgctggtgttttcttcacctgccatgtaaacttttcaccctggaattcttgtctcagtgcttatttctagaagagctcaaactaagacacctcctttgcccctccaaaccttgggggaatgaagggttttccacagttccctggtgcttcatccttccttgtttatctcttgactccttccacagttttgaaacaatcccttcattagccctcttcacttaattttttaaactactacgtatttctgtggagaatctgaccgaattgcaccaaaatatggctggctccttctgctccatccccattctacatcaggaccctgggacctgaagtcttcccatgttctcacctccttctgtaggagtcttagcttgaattctgacaactaatgttctctgccttgttatgtctttttcttcatgaagtccacattcgtcacaagagaggaccatgttttctttgtgtctctaggtcctcttctgacttccaactcactccattgttttcctttttgcttggtggataagatttctattggcgccacagaagacagactgtactcagcctagctgttaatcaacctttgatgaaaatgaggaactgaggaatctggaattttctatgaggatgaatgtattactatcaacatttaatcccctcctccagagtctgtgttctcagtaaaatgagaaagatggtgaattctccaagtctttaccacaaaaaggcaagctatgctttggtgtttttcactttatgccattttttatttccgtccaccttgatgattagggcttaggaattcaatgtatgaatctaaactctttactgccttgccatatttctaaggcagtgagacaggctgtcatcaaatctgtcaataactcttaataccaatcctctcactattttagtctttccaaatctacccattcttacgtctcatttcaggaacatgccctaatcgtgactaaaagtcatcgtttctcccttaggctccttcatagtgcttgctatacattttttcattttcaagaagctagaagttatggtcaggcaggttcactgggaacctagtctctggggatggagttggccaaagccttcagctaaaccatggatgtgtgccactgacctcttttctccttaagaaagagtcttcattgagacaggttaacaactaagttctagcttcatatgggagaagttttaatcttcagtgttcataaatagtataatagcatataagtatgctttttttttgacaaaaatactgagttctaaaatgtgatttctccttaatatggtctatttctgttctgtctttatggttttgtggtgataatccaaaacaattacagttgacgcttaatgaatgtgacattcttttccatcatttttccaattatttggagtcatgatgaaaatgccctcttgaggctgaattccaaaatggcacataaattagcacaaaatccgtggtataaaatccaggtacctctgagtttacttagagttccattcaaagaaatgatggtccgtcagaaatacattttaactgagaagcctatcttttcctagtcttttgagcacatgccagaatgggtatgagtttcattttagaagcacggaaaaacaaaaattttttctttctttcttttatttttgaaatagagacaggatcttgctctgttgcacaggatggagtgcagtggcatgatcatagctcacttgcagtcttgaactcctgagctcaagtgatcctcccacctcagcgtccagagtagctaggaccacagacacatgccaccatacttggttaatttttgaaatctttttgtagagatggagtctcgctatgttgcacaggctggtcttgaactcctggccttaagtgatcctcccatctcagcctcccagagtgctgggattacaggcataagtcactatgcccagctgcaaattttcatttaaaaaacctttcttctcattatcaatacctctacatacctggaggtagcccttgaaacagcgcctccttatttgacttctcctaaagcctttatcttagcagtctgaacatctcttttatctcttctccacattttcctaattgaagcagctgataaaacggtatactctctcccttcctcatttacatcatccctgtattgtttatctagggttgttataacaaattaccaaaagttggtggcttaaaacagtacaaatttatttacttacagttccgaaggccagaagtctaaaattagttccactgggctaaagtcagaatgttggcagggccagtccttctggaggctccagggaagaatccattttctcgtcttttccacattggtgtgactgccaacatttcttagttttggccacattgctcttatccttgctgccatggtcacattgctttcttcttttctgtagtcgaatctccctctgctatcctcttctaagcgcatttgtgattacattttcaacgaatccaagatcattccatttcaagatccttaactaatcacatctgcaaagcccctttggccatatacgattatttgcaggacctgcatatattttggggggctttattcagcctaccacagtctcctaaccacaagacgtcctctaaatgtcttcttgccaccttcctcacacgttcacgcttccaatgtgcacgatcattttaccagaccatcctgggaagtattacacttctcaccctgaatttgatttctagcaaataatattatctactacattacaccttgagtttcacgagaaagtcacattgaaatggaggctttgggtggggtgtggatggagaatcccctatgcacccttccttccactcccaacctgggtttctatatttaggtttccccaccttcttctctaagcctcctgttctgaaactccataccccttcttgagaaagttcccatttctagattttttaggttctttattaggctagtgggccatatgccaagtctgagtctgacagtcatgagcagagctttagactccagcccactgggcagctgaagcttattattcttagtaatgcaggtgctggggtggaggaaaacagggagtgtgggcattagtcctgggggtaatagttaactcaactccttcaattctagtttccttttcattacttgcaccaaaaggagctgcagccccattgctttctttgctagtgagtcaatcaaagtaagcactctggccctgaagaacaaactatacttgagcatcagtacagtctaaacccatgttgagaaaagactcaattgcctcactcagccaggagcctgccctacccctggtgtgactgggtccccatcactgtgaaatgaagttttgtggggtttttttttttttttttgctttatctggcaagctttccaaaaccctaaaagaagttggcattaacatttaatgctttttcactttatttatatgtgaagtgggctagcctaaattaaattattttgagtcggactttcccctctaatggaaatcagggtgactatcttctaatttcttccatcccatggtatatgttaaatgctgtggtgtctgaatttatttcctagcaacagtcaacaaaaatggctatttctgggaagcactcctcttttcacataaagaaacccaagtgaatgaacatgagaaatatgggaaccattgcctgccttccagtcgaagcttgggtccacctaacagttcccaaacagggttttgagagtcaatcctattagtatatgaggattgaaggagtaatttaaaataatcaaaataccttcccactcttctccaactccactctctcaccctaaagaaacaatgatgttgaatcctggatttcaagcaaaatgttacagaaattcaactgtccagattttcaactgtctggaataatcagtatgtgaataagccgagggttgagacattaaatctgatcacaaggaaaagtataaggctcagcagaacagagacccctcaaccacagactctccagggatcctcagtccaacatcatagatagtttctagaagggcaatgatttacctgggggtacactcctagtcagtgtcagaagcagaacagaaactcttgcttatctctttctccacttgctttattctacccaatctgacttcacatgccttttgttcaatccctaaatattcattctcctctcttatctcccatcttcctctacacactggggaaggctgcgaagaggataaaggggaagcaggcgaaagattctgggtggttagcaagtagatgagaggcaatggtggaagaatcttctccctcttctccaagacctgcttcacctccaggcttgtctgctctccaagaccaatgttctcccaactccccactcttcccctgacacaagagacacttctgtaatgcccttcatgctccaagttcttgtcatacctgagaagctctggccaacagctgttgcttcaatgaatgcgttcatgggaatgaggactagatccctgagttctgggacccagaccctatcctttcactcctgctacatccttttagtttatttgcagctctactactcacggttttggctaagacctgagagttgtacaattatcatcatcaccactcaagaaagaatgtgcctataccaaacttcacctagcattctgagtaagagaagcgttttttgttagtcagtaaagtttcagagccctacttcaatcttatcagactctatattttactcagacactgcaactccagcaggtaaaatctgcttacctaaccaccaattgtggtatggcccatcttgagctctgagcctgcccctgcttaggatgggctcctcgtccaggtgaaaatgcataagaggttttctcatggcataattacttctgttttactatttcttgatggctgttgcttcatgtctgattgcttatagttcacctgttgatgaaatattcttggcagtctgagtaactgaaaaatatacgggaagaagaaagttagggaccagtttcaatgcacagttcggggcagaccaggcttgaggcaataaatatataaaacacaaatggacaacataaatctaggacaatcaagagtctaggtggtcaacaggtgactgttaataaatattcagagagcaaggaaaggtatatgtcattgagtctataacctcctagtcaatctctgaattgtctctgtagaaatcctggaaaagggcccttcatcttttgcttgagtgcagttagtgtcagagctcactctaacgtggggactcattctgctttagaacaactccaaatgttggaaagctcttcattacgttgagctggagctcttttccttgtgatattgctctttggttctacttctcattgtagagtaacacaaaataaactttcctccatatgataaacttttcttccttacttttacctagcatttccttatttattagggaaaaaataagtctactgtgtgcaaggcactctactagatgccacagggaataaaagcatcagtacagtttaaacccatgttaagaaaagacccaattgccttgcttagccagaagcctgccctgcccttggtgtcaatgggtccctatcactgtgaaataaatatttttttttgctttgtctggcaaaatcagtgcaaatcctgattaatgccttcaaggaactataatttcatagagataaaagagacaatattgaacatagtaagaacctaagccaagtgaaaattgttatattgtattgacaggctaggagatacaagagaggtagaaatctttaattaataagctatatgtgaattgaaacttaaagggtgaataagactttgacagatggaactagggcactatcaggatgtacaaatgttggagggatattccaggtggaggagagtaagaaagggtaattggctgggcacagtggctcatgcctgtaatcctagcactgtgggaggctgaggatggtggatcacttgaggtcaggagtttgagaacagcctggccaacatggtgaaaccccgtctctactaaaaatacaaaaattagtcagatatggtggcaggctcctgtaatcccagctcttctggaggctgaagcgggagaattgcttgaacccaggaggtggaggttacagtgagctgagattgaccagtacattcctctttgggaggctgaggtgggtggatcacaaggtcaggagatagagaccaccctggccaacatggtgaaaccctgtctctactaaaaatacaaaaaattagccgggcattgtagcaggtggtctgtaatcccagctacatgggaggctgaggcaggagaatcgcttgaacccaggaggcggaggttgcagtgagccgagatcacaccattgcactccagcctgggcaaaaagagcgaaactccatctcaaaaaaaaaaaaaaaaagaagaattatctcactttcctcatattttatgagtacggcactctattagagtaaggttcccagtctttgacccattattacttactcttctttgacagaatggcaggcgacagccattgggccatttctatagcaaaacaatacacgaaggttgagacccttgattgggaagttttaataccttgggccaggggagctcttcaactctgtcagaacagttaactggagcaagtatttatactcttagagtttgtgaggcaggggtctttgcatatttgcagctttggtgggggatcttagcaaattctgggagcttcacctgacctttaatttctcagatgcaacttggcatatttcaggtaagactgaagtaagaattacatcattttaggaacaagtaggtgagtcagtatttgttgcttttaccatgtttcttaggcaagacttccagatgaagatcagaacattaaataacaaagacagctgttttaggtaaaataatgccgccctgcagaggtccacattctaatctctggaacctgtgggtatgttaccttacacagcaaaaggactttgcagatgtgattaagttaaggatcttgaagttcacctggattatctgagtgggcccagtgtaatcacaagggtccttacaagggaaagagggaggcaggagagtcacgaaggagatgtcacaatgaaagcaggggttggagggatgtttgaaagggggctatgaggcacataatgcagacaatgtcagaaaaagcgaggaaatggactgacacccggagcctccagaagaaatagagctctgctgacaccttgattttagcccagtgaggcctatttctgacttctgccttctagaactagaagttaataaatctgtgttgtttttagcaaaatttgtggtaatttattacagcagcaacaggaaactaacacagcaatgaagctcctgtgatagttaatattgagtgtcaacttgattggattgaaggttgcaaagtattgttcctaggtgtgtctgtgagggtgatgccaaaggagattagcatttgagttactgaactgggagtcgcagacccatcctcaatctgggaaccatagctgccagcacgactaggataaaagcaggcagaggaacgtgagaggactagactggctaagtcttctggcctccatctttctcgcgtgctgagtgcttcctttcctctaacattggactccaagttcttcagctttttgactcttggacctacaccagtggtttgccaggggctctcgggcctttggccacagactgaaggctacactgtctgcttccctactttcaaggttttaggacttggactggcttccttgctcctcagcttgcagacagcctattgtgggacttctccttgtgattgtatgagtcaacactccttaataaaccccccttcctatatacatctgtcctattaatcctgtccctctagaggaccttgaataatccagctctctagtgtcagaaaacattactgtgtgagagtctagcttcaaaaccttagtgctaggtctgaggaggcagtgccagatcacttgccctcaattcttaccaaatagaataataacttcataagcagtgactatgacattaggtttcaggggcccaagctgttttgaccatcaaaggttgatgcattttattaataaacaaatgaaaaggatggccaggcatggtggctcacgcctataatccgagcactttgggaggctgaggtgggcagatcacctgaggtcaggagtctgagaccagcctggccaacatggtgaaacctcatcactactaaaaatacaaaaaattagctaggtgtggtggcgcacacctgtagtctaagctacacaggaggctgaggcaggagaatagtttaaactcaggaggcagaggttacagtgattcaagatcatgccactgcactctagcctgggcaacagaatgagactccatctcaaacataaataaataagtaaataaataaataaataaacaaacaaaccaacgaaaaggaatggaagcaaatagcagctttcagttttgatgcatgaagaggttgggcaattcctcttgcaaaaagtaagcaaaggtagacacaatattgggaaaaatctgcatctgataataactgtgagttggtggttaccttgtctggggcactccccagtcccccatccttcccagcataggctgtggaaagctgcaaatatttggaaattaaacaatttatttataaataactcatgggtcaaagatgaaattacaggaaattatgaagtattttgaactaagtgaaaatgaagatacaacatatcaaaatctgtggcatacatacaatgtggtgcataatgggaattttataattctaaattcttcaattagaaaagaataaagttctaaaaatcaataatataagcttccaccttaagaagctagaaagaggaacaaattgaatccaaagtactccaaaaaaggaaataaaaataaaattaatgaaacagaacagagtcaaaaatagaaagaaaatcaaaagctatttctttatgtacacttgccaagaaaaaggcaagaagacaaacttaaccaaaatagggaatgaaaagagagacattacatagatccttcagacaccaaaataaaataaaataaaataaaataaaataaaataaaataaaataagggtactgtattagtcagagttctctagagggacagaactaataggacagaaatagatatataaaggggtgtttattaagtagtattaacttacaagatcacaaggtcccataatgggccatctgtaagctgaggagcaaggaagctagtctgagtctcaaagctgaagaagttggagtccgaggttcaagggcaggaagcattcagtacaggagaaagatataggctgggaggctaagccagtctaaccttttcatgtttttctgcctgttttatattctagcttcgctgacagctgattagatggtgcccacccagattaagggtgcatctgcctttcccagcccactgactcaaatgttaatttcctttggcaacatcctcatagacacacccaagatcaatactttgcatccttcaatccaatcaggttgacattcagtattaaccatcacaggtatattatgaaaaacatcatggcaataaatttggtaacacagatgaaatagataaatcccttgaaagacaaatcacaaaaagtgactcaagaagacctaaacatcctcatatttaaagcattgaatttgtaattaaaaccttttcaaaatgaaaactgtatccagatgtgtcttgacaggtgcagtctaccatttaaggaagatacaacatcaatcccacacaaactctttcagaaaattggaggaggttagaacacttctcattttatgaggacagtattactgtggacagagacatgacaagaaaaaactttcgaccagtatctttcttgaacatagtggcaaaaatccttaacaaaatctagcaaattaatccagcaatacataaaaagaagaatgcattgtgaccaagttgattttgtcctaggaatgcaaagctggtttaacatccaaaaatcaattaacatgcttcaccatattaataaaataaaggtgaaaaatacatgatcatcatacatgcagaaaaagcatttgacaaactcttagcaaactagaaatagaaaggtacttcttcaatttgataagggccatttaagaaaatcctacagatagcatcatactttctaccacaggaagaaggtaaggatgtctgctatcaccacttcttttcaacattgtactgacagtcctcattagtgcaaaaacacaagaaaaataagtaaaatacatgcagattagaaatgaagaaaaaaaaatctgtctttatgccaagactacattatcgtgtatgtaggaattcataaggaatctataaaaagctttgagaacttgtggtttagcaaggtcacagaataaaatgttaatatacaaacatcaataccatgtttatataccaccacaaagcaaacaattgggaaataaaaaacaattcaatttaaagtgaaataaaattagtgaaatatattataaacgtagaataaaattagcaaaagatgtgaaagacctgcgttctgaaaactaaaaaaaaaaacactgaaaactgcaaaaagagaaattagagaaaacttgaataaattgagagatataaaccgtgctaattaattggaagatgccaatcaagtcaataaaatgccaatcaaaatcctagcaggatttttggtataaattcacaagatgcttctaaaatttatatgaaagtgcaaaggaaatagaataaatgaaacgaaaaaaagaaggaaagttggtagatttatatgatctgagttaagacttcctagaaagctatagtaattcaagaaattgtgacattggcataaggatagacatagagattgacacatcacacatatacagtcaattgatttttaagatagggaccagcaaaattcagcagggcgctgaggggcagagtttaatttcttctgggaattgcacaatgtgagggagtttatatgcaaatagctctgtaataattggacatctgttgggaaaaattaaactttgtcccttacctcataccatactcaaactcaaggtcaggtgtggtggctcacacctgtaatcccagcactttgggaggccaaggtgggcggatcacctgaggtcaggagttcaagaccaccctggtcaacatggtgaaaccccgtcactactaaaaatacaaaaattagctgggcatggtggtacatgcctgtaatcccagctacttgggaggttgaggcaggagaatcgcttgaacccaagtggaggaggttacagtgagccgagatcatgccactgcactccatcctggacgatagagtgtgactccatctccaataataataataaaaactcaaaatggatcataaacttaaataaaataatcaaaactataaatctcctagaaggaagcataagacaaaattttatgacttaaataaagatttcttaggaaggaaaccaaaatataaattatggaaaaaattataacttagatttcataaattggactttctgtttttgaaacatactattaagaaaataaaaagacaagtcgtagactggtagaaaatattgttaatacctatatcttacaagagacttatatccagaagatataactcaataattagaagaaaaacatcccaattaaatatgggcacaagatttgaagatgtcaactggtatgtatacaattcacaaaagagagatatatatatatatacagccaacaaacatgaaaaagttgtttccttctctctgactacccttcttcccatagtaccactgattcactgccatggtccttggccacattaatgtgggtccagactaagtattgtgttcaggaaacaggtttgtctgagatgatctctttaagggctgggatttgtttgatttctaaattttatggatgtagtgctaaaatccaaggcagcagtgtttgaaggaacttagactccaccagctacctaagcctgagccctttagctgagcctaagtggaataataacttggggagaaagaattaaggacattaatgcttttgcacattagattatttggactttaacttgcaagagaatttaatcattggacctccatttcttctgggaatttcacaatgtgagggagtttatatgaaaattttgggaatctttatgttgttagaaatttattagtgaaatatattagtactgccgtttaatcatcttgcataacctctggtgagctatattgggaagcagagttgggcataatttgggatgggaaatagaagagggagaaaattgtcagccctggatacagggcagatgtggagttaatctaattaatgtactgtctgggagcaattttatgtttcccatcagtagtcacaggaggacaccaaataagcggtaggtggtattgaagaagcagcccatgaaggtgagaataggactgttttgatgaatagctggtctcctcccttgcagaggagggtcatagtcttggctgatatacttcaaggttaatgttaattccaaaggataagaggaaaaaaaggggacacaattggggaacttcccactccccgtcaatctgtttgtttgtttttttttttaaataggagggtccttagctaacgcccttgtcttttgcccattttctttcttattccacccactctgaccagtagtagacacccaccggtccatgtttatctgtttgatggagctggtctattacaaaattccaagcactgggatgtaaatctccattattttctctatcagtgtgaagcagagatcctggatggcgtttgatttttcagatccaagtttttcccttcattgggctttcctaagatctcactagagtatgaatgggaggtagtatagtagagagtatcagtatagtctttttattgcacaaattagccactgtattagtccgttttcacactgctgataaagacatattcaagactgggcaatttactaaagaaagaggtttaattggacttatagttccatgtggctggggcagcctcacaaacacggtggaaggcaaggaggagcaagtcacatcttatgtggatggcagcaggcaaagagagcttgtgcaggaaaactttgccttataaagccatcagatctggtgagacttattcactatcatgagaacagcacgggaaagactgattcaactatctcccactggtccctcccataacacgtgggaattatgggagtacaattcaaaatgagatttgtgtggggacatgagtcacatatcagccacatactccatcctagcttttatagcattatatctaaaattttaatctccatttttatgtctcccattgagagtctgtttctcaactggtttttagctcatgtagggagtaggagagttattttttggattctttcaaaccagaggaatcaatgcaaaatcacacaaatagggagtagggtttgttagagaccagggacttgaatgcatgagagtggtgggccatgagccaagacatgtagtttgcagccaggcaatggtcaaggctttagatttaatatgttttaatcaaatggagggagcattggaggtgtttcaacagggcaggaacatttccagacatgagttttccaaagaataatctgacggcaggatgtaaattgactaaggataggtgaaaggagatggtcaataggagagaagacaactgaggaaataaaggcaagaaagggtgataatattgtagaggtgtaaccagtagaagttggcagatgattctcggttgaggatgaaggaagcagagttgtcaacataataaagtcgctcagccttggcagtttaaaacaaggataagcaaactttttctgtaaagggcagatatatgtattttaggttttgtgagccatacaatctctatggcaattattcaaagctaccattgtagcttgaaagcaccagtagacaatacagaaacaaacgacaaggctgtgtgtcaataaaactttatttaatagaacatctggcctataggctgtgatttgccgacccctggtttagagggttatggtacagatgctggttattaaattattgcctgtgagttctaaattcaccctctagtccctgccctgggatgctgtggctgagactctgcagaccatgtttctgttttgccagctgcttcgtgtgaggtctggagcagggagaacgtgcatagttcttcatgttttgcttgctgttcttgtcaggatcaccacaacaatggtttttgcactaggccaccacaatgcattctgatttccagttggttcttacattcctgaaatgcagctgtgatccagatgcctcagaaacaccagctggttggtatcctctcctcagaggtttgtgtcctggcatctcaaggctcctcatctgagcttctgaggcagcagcaccaactgggcagtgccctctccccagatccaagcttctaggttctgataatcctgacctctaccctctgcactactagccctaggagtggtagctgctttctgcagtcactgtttacctcactgttccctttgttttgccctttcaatcctctaatgcctgtttaacttattccccatattaaattcttcctattgaaataagtggtgtggttttcattctcctgactgaaccctgatcaatatagaactatattctgtattaaatagggttctacctagggatatagacagaaagtacaaaaagtgtgatcttgaagtcttgatatgttgtgtctatttttagagatgataggtttgagatcctgacaaatagaccatttacagatttcttccttgccattggatattgaatgtcagggatatgttattcacatggcagtgttgtttgcatgagtagaaaacattaactaggtaagtatagctagagtggagaagacagaaatgggaatcatcttcatttctgagagataatgaagaagagacaattaacatgacttaaaaaatgaatgtcttaaaggcagaaggaagcctgcagaatacaagaagcacagagtgagttttaaggagaagacggtcaagataagcaaatcctatacgcttcagggcagattattggtgacttaccagaggatagtttcaatagaagagcaaagttagaaccggaggagttagttggtgggagaagaggaacgagtaggaacttttttttttaagtaaagacatttgttggtaaaaagaaggtgaatgactatgtagagatttatgaatcaaaataaataatattaaaaaaattcactgcacttgaggaaatttctaggtagagaagagtttatcagtggtgaggggtaatgcaatacgtataggataaaggatcacatgaatggagaaatgtgggtgaggatgaatgggatgcaaaatgcaattgatagaaaggaagggtacccccttctttgagctccagataaatttagatgtggggaggagaaaagctaaacttgttttgcaaactgaaactgtcctaattctttgtccttgtgttaagcagtaataggaccagatagagtttccaattcctctgctaaacaatgctaagaccaagcaacactaatagctgctttttcagggaacgcatgctcatggttgatgagactgtggaccatcctgcccagacccctcttcagggaaagactcctgccctctctgctgggaatgctactgggagaaagcctgtatctgtcattccgctcaggggttgcttagctgcagaaagctgctttgctcaaggcactttctttcaggggcagcctatgtcctatagcatggcccaatgtggggcatttctgatgggtcattttaaatccagagcttcctgggttgggggtgggcattgattaaaactgcatcatagcttgacttctccctctggctaatgtggagcgaggctgcattgtggaggctgcatcacagcttgaattctccctctggccaatgcagcttcctcctcatctattccataggtgtgatctcaaaggccttcctaataaccatcctgaatactaagctgccccaagcagacttcatggagaacccaacctgtaacgccagctcagcggcttacttctgacagcttgcccagaaagaccagcattaatgctcctgcctccctgtgtctactgtgtcaatgtattttgtcatatattctccccaatcccaactagctttctgccttgtgatatctactttaaagtcacccagcctagaccctaaaactctggagatagcccgcctcggttgtttattttgagactgttctcccttacttcaacaagttcaataaacttagcttttcttgagtaacaggtttttctggtggtcttctagagaattgatagtggaacattttcatcagatgtcattgttctttctaagtttcagacaggctggtagcttcagggaaagaggaaaagtttcgaaaacatatattgtttgccaatttaataagaaaattaaccctaaaaattacattttatgtcttgacttgggatttcacaaggaggggtaatctccttgggatggagagcaggcaggagttatacaaacttggcctcagttggcctggtatagaccaatctgtcttctgtcttcattttgcactttgtaattagtgttctcctcagtcctgattcctctgatggggcagcttgggctctggtgaatgtggagtccctgatttctgctttgattctggtgtcatttgtttccttggtgccaaggccctttgtgattctgagcactctcatctctcctttcctcccctctcttaggcttctcgtcccacttccatgatcctctggttcctatagggtcaggaaggaaagcttgtagccacagaaagctatttatttatttatttatttatttatttatttatttatttatttatttgagatggagtcttgcgctattgccacactggagtgcagtggctcaatcttggctcactgcaacctctgcctcctgggttcaagcgattctcctgcctcagtctcctgagtaactgggactacaggtgcacaccaccatgcccagctaattttttgtatttttagtagagatggggtttcaccatgttggccagattgctctcaatctcttgacctacagaaagtttttatctcttccttgtgtgaaatatattgataggagcttgggaacacatagacaaatacaataattttcctttcaaataatcctagagataccacaaaaacaattatatgtgagacgaactttcatgtgctcaaatacgttatgacctcaagaagaaatgtaatccattctactgccttctacttcattcttagagatgggtgtttcctgtaggtttttagtagttctcactagaacatatctcttatttgctggaatttaaacccatttctttttcctgttaatgaaaataattcatgcaactattactgaagccctactaggacagatccaccaaccccggcatgatgtcatgtttcatcctggaaggtggttagcaaacctcttctccatcttctcttatgtagaccaaatggacccgatttctttcctttatgtgatttccaaaatacagtttttttttttttttttgagacggagtctcgctctgtcgcccaggccagactgcggactgcagtggcgcaatctcggctcactgcaagctccgcttcccgggttcacgccattctcctgcctcagcctcccgagtagctgggactacaggcgcccgccaccgtgcccggctaattttttgtatttttagtagagacggggtttccccttgttagccaggatggtctcgatctcctgacctcatgatccacccgcctcggcctcccaaagtgctgggattacaggcgtgagccaccgcgcccggcccaaaatacagttttaatttctctcttttgaatgcactgttggtaaaggaaggggtggggtattaagtcaagctcaacccacaaaagatccttaactcagactaccagcctgactttgtaagcttttgaatataggcttacttgaagtcacttgggttttcccctttttcaattatcttcatcattcaagagcatacactggtgcctcaaggcactaaatattacaatttcaagcaccctactcagctcaagctctccttgttgtgcccttaaaaagtactttgaataatgacttcttttcctctgagtagatacccagtagtgggattgttggatcaaatggtagttctatttttagctgtttaaggaatctccacactgttttccatagcagctgtactagttgacattcccaccagcagtgtagaagtgttctctgatcactgcatccacaccaatatctactgtttttttattttttgattatggctattctagcagaagtaaggtggtatcgcattgtggttgatttgcatttccctgatcgttagtgatgttgagcatttttcatatgttttttggccatttgtgtatcttcttttgagaattgtgggagctaagctatgaggacacaaaggcataagaatgatacaatagactttggggacatggggagaagaatgggaggcgggcgagggataaaagaaaacaaatatgtgcagtgtatacttctcaggtgatgggtgcaccaggatctcacaaatctcccctaaagaacttacttatgtaaccaaataccacctgtaccccaataacttatggaaaaataaaattaaaaaaaagaaagaaaaaaagtgctttgaggcccagctggctataggggccatttagaaaccatttttccttagaggcatagtgaaggtagagcacaatgctgagaagcgataaaaagactgagttctgatgttatcatctagaaatctgccacccccacaaagaacaaaacagaagctcttgctaagcacttttttccatagtataacttgttcttataaagaagtggcacttagtgtttcagcggatcaaattaacacatacatcttttaaaaacatcttttaaaaaaagacaaacctgaattttaaaatgacaccttctttagaaaaaagggttaggacacgtttttaaattatatgctttaaagaaagcttacaatgcagttatacaattttcactaaaaatttgctaaaattagtacaatttctattctcataattatgagcttttcagcttttgcacttcgcatctcttcattttcccacagttattactaggtgtgagctttccagtttctatatattacccccttcaaatcccacagcctctatgtttttggggagggagagtgagacatgtgctataagtgatcctggactgaagcctgggggtgttacaggtcaggccacttcatctcatcccacttatggccaatcccattcatttgaacccttgcacatactttttcttacttctaaaagcatgtcactttatgtctgtgtatgtatcctcacactcagtcatttcactgccagtcaaatatacccgaggtctcagtttcctctgcagaagagaaggatttcttctctcactcatccgtgggctcattgctgaggcctccataacaaaagaaagagtaacaagaaaaaagagtgcagatttatttattataaattttacaagacatgagagtctccagaaacgaagacctgaagaaaggaagaaagttgcgcatttttatgcttaagtttgatgaacagtggacagtcattggggaagtgtgattggcctgatctagtggtaataaactggggaacttagcaaatcacaccagactagggagtccgatctagtggtaaaaaactagggaacttagcaaggactgtttgttcagattcttctctgcgtcctgtgtcttcagagatatggatgtttttttcctctgtaggtatggggaggtacctgttgaatgaggatcttatgacctacttcaggggagaaaagtgggagaaattcagagtggcctttccacttctgctgttttctcaaatgccaaagtgccaaattttgggatagtgtggcctgaaccccatcacttcattaaaaaaatagttgctgaagtctcttctatctctgaagttttactattcgatcattttaaaatctttagctcaatcctcaggatttacatttcaacatttccttaaaatctttactgggtgataacttcgagggttatacgagtgtgtgttgttttagttcactgagaaagccatgcccttcagctctttattctgcccaggtgggtatgaggacaatcctctgtttacgaaagtaccatggattatgcctgcaagatgaatttgtatcttttaaaaaaaattgagtatgatgttttacttctgagagccccatatttaaccatttcacaacttccttctctgatttctgggaaacgcctagatttttcaaaagtcactgtggaaatcacccatatcacaagatgttttctatctttatcttctaccctttgacaacttgcttaggaggaaatagtctgtttagattttacttcagtttgggagttcctgtttttccattttttgtatttttatattgtgactttcatggttttttttttcctttgaaagttagatggggtaaaggggattgcccctgtgagaatggataggaaggaacgactttataaacgtaaacaagcgtttttatttgtggcaattctacatggggaacatgctgaattagtaggctcccaattcttagatttctagaacaagaacatatgtaacataagcttctcttatgttatttcaaatgaaaaaacttaaaaaaagtcatagatggcagtcaaattgcttcctgggcttaagtggcaatttaaacatcagaaacatttggatgaaatttctcacaaaacatggcagagagtggccgggcgcggtggctcacacctgtaatcccaagcactatgggaggccgaggcgggtggatcacctgaagtcaggagtttgaggctagcctggccaatatggtgaaaccccatctctactaaaaacgcaaaaaagtagccaggcatagtggctcgtgcctgtaatcccagctacttaggaggctggggcgagagaatagcttgaacccgggaggcagaggctacagtgagccaagatcacgccaccacactccagcctgggtgacagagtgagaccccgtctcaaaaaaaaaaaacaaaagagagaaaaatacccaatgcaacctagtcttctttttgagtaaatacaatatacttagttcaagagacaacgtgtatttcaatctcaaagtctgttagggccaagacgcattagggtttggaacaaggaaggagatgagagtttccgagctgtgtaactgccaggggtggtgtatatacatttgaagagtaaggtgggactaccccaggatgggtgatccatgggttacacctaaggtaagagtaagtcaggaatgcctaggcggatgcagaaatcaaatgggatctgaaaagaatgcctattcacccaaaagtgaacaaccagggagaataaatgtcaacaaaggggttgcttctgagagctctagagtctagaggaacaggtagccaaaaatgagttaaagctgatggaaatgtaaatatagcaaattgtgtgacagcgtgttcatacggaggcccagactgaatctgaggacaaagaagtcactcaactttctgtgctcctgactttggaccttaaagtttctctctccaacttctgacatgacaatgtttatttagcgcctactctatgcctggcatggagaatacacattagactcaagatgggcttgcctctcctgagcattcacagctatggacccatcacgcttcctgtcttttctgtctccctactgcttcttcctatttgaccactcccttttttctttttcattggcttctttttcccatttcttttcattctaaattttctttcttgatatttaatgtattcccaaagattaatctattattcccaaaggggatgaccatatctctaggtacttgaatatttctcagaatttcctttcatcacttcacacattatatataaattatttagtatatggggtataaagatgagtatgatatacatttatccattcatttattcttttatccagtgactatgtattgagtgcttaataagtgccacatattattggagaaactggtgatacagagatcatgaagatgagtttcttttcctcatggactcacggtctaggggaagagtaaaacacataaacatacaaaggttgcagaggcttaagtgaagaactgtgaaaggccagcaaatacataagattgtaagataaacactttgcagcctaacatcactcctgtcttcatcttattttcccataatttgccaacttgaatatatttaactttgctaaatagtgcgtatctctgtatgtgacattatctgcatttattttttgtcatggtgtgtgttatgaataaatacaataaacagaaatctatatttaaggaagatgattttgagatgggcattgaaggatgagtagaagttcaagtagtaagaagagaaaaaaaggcaaaatacacagtatatgcaaaggcatatgaaattaaagaatttgaggtgttctgataatggtgggtagttttttatggaggccatagggtacttggaaatgaatggcaagaaagttcttctggaagaaaaagaacttctgatcatactaaggagattggaccctatcctgtagtcaatgaacaaacattgtagtcaatgaagtagaggaatgacatttggccctttgatggcagagtgaaaatgatagattgaagtggagcaggccaaaaattaggcaacaactggaatgagggcctggactaaggtactagtggcagtggtataaatgaagtgatcagtttgaacaatatcaaagagatagagtgacaagactttaagaatctttgggtacaggcaataggggagagaggagaggcaggctttcatctggatggtggatgacatcctcattcccacagacattggatgcatgggccttggatataacttagaatcttgcgaggcgataaaaagaccaccagcgcgtgagaagtgagttagccacagtttaccttctatggtttgcagtttgccatagacttccattcctttatttgatactctatgaatgatgtcacagacaatacatgatcaagtgtcaaacatagatggtggtatgctatgacatcaagaattctgggctcaccttctggactgacaataactggaggtgtgaattttggtaaccacttactgtctttggacttcattttctcatctttaaagtttgtttcaggtggggtagggtgagtagtactctaggtgacatttaagttttttttggatctattaacttatgagtaaatactcatctttcttccccaagatagtttctccttctgactagattgttatttcctggaaggcagggactgctgtgttcatctctggattccaatacaccacgtaggatctgggggtaaaagtgcagagttaatgttattgagcaaatgactgaatgaaagattttcctattttattaatgatactatatagcccgttctctctgcttcctgttattaaaaccttggggtattctgtacccgccttcttcttgcataacaccctcactcccccttggtcttgcttccttaatcaggacatactttttccctctaagtgtcttttagatacggcttccttttccacctctagacagtcacccagatctctgcacttcaccttaaattgagactactgcaacaatatgtttgctttctgtcgtaatctccctctcttaagcccacttcatatactactaccatatttagcttccactgctttgtggcttaaaccctcaaatgtctacggtgtacatttatactcaatgccagtcacaatctggctccaacctgcattgacgtgaattctccagttaacctgtcactggtgatcttttagacacttgcacattgccatctctgtgtgttgcttattgctatctcccctgtctggaaagctctcctcactatctaagtgcaattcatcagtcaaggtccagcttgttatttctccaccaacctccccctgaagtcttcccaggttatatttttgcctacagtaatctgtctttcactcagctgacaaataatatcatcacatatttattaggctacttctcatgttattatcttatcacatgcttatgtctcatcaccccaagtatcttgcaagctccttggggtggtaggaatatgtctgaggtatctttgtattgctcgttgtctaatgaccaccatgacaagaacaacagctcacattggttgatcactcatgtgtgttagacattgccaagcccttgatattcattatctctcttaatatctaaaaccgccctatgtcatgggtacgatgactatctccattcttcagatggggaaacgaaagcttagaagtgttaagtaatttgcattaggccacctatagattaagtctagtttagtttttacacttagtaggcacccccaaaatggaataattaattgtcaagagatgtatcttggtgttttccctctccaagtgactgaagcaaagatgttgagaaggaggatagttttgaggttagctgtggaacagccttgaggagatttagagggagtcagcagcagagcaggagtcctgtcagtgagaggtaaaagattgtgagatgaggaaaatctgttttggaatcagttagacccatatctggcaatgtagcaaaatgtaaaataccctgggtcgataacctatgaaaatggaggaagtttagaacaagagttacccaagatagaacttatatgtttgtttagctaggttatttgggtagcatggaaagtttccagctagattttaaggagtaagcatgttagtttaaattaagacaatattttgtaatgggaaaactgtaacaataaataatatgattcaattacaaggagtgggttgcatacaataatgtaatgcgtctagggcctaagaggcagttcagactacattctgggttcattcttgcccttgggaaccataaagtgtgaatgagataaacttgctttctattcaaaatacttcccagggtgggatgtattcccagaacttctcagggtgggaaaaggataacagtggttgagatgactactggcctcagggctcacatgaagcatctcctggactggaggaaggcttgtgtccttgaaaggcacagtgccctggtctgctctggcatttgacaacggacacccaggttacaattcaccaaaggacacaatcctaggaagccaagtgcccatcagtttcctgctctggaagtggaggaggcaatgaggaactctgagttctggtcaccaccgcagaaggacctcttgaagtacaaggccaaagagccctgacgtgggaaggatggcaatgaacactgaatgagcatttagactatgtgcaaaagcagtgtttggcactttagacaccttatctcattaaagttcacacccctacaggaaaatggcttggggaggttaaatagcttatgcaagatcccacagctaggaagtggcagagtggagattcacagctagatactttgactttcaagtgcatacatgttactttctgttcaccaagaagaataccctgctcccttgggctctaactgcagctttgttattaactggctatgtgaccttggcaggcctcttaaaaagatcttgactgaggttgcttccaacactgtgagtctctctctgatcataatggaggaatgggaaaaaatccaaatgttaggtagaaatggtgagcccaatcgcaatatggtcgttcaacctaaatttttctaccatcaaaatcagataatggaaatgaaaggatcaaaagagggaaatcatgggaagcccaaactcctatgaactggaattactgcattcttggagcagtaaaacagataagcaatgtggtgataaacacgcaaagaccagcagactttcaacaaactcatttcttctcatctggcctgtcctcccatgtaagctgggacaggcctgggatctttgggtctttttgcctttgatttaaaaatgggtcatctattcccaagccaactgacccaagaactcaaaaaagaaggtaatggaagatgcacaatgctgtgtgtctcttaaaaaatatacaatattggttgtcttcctatgggggctgaagagattgtacagaaatcattacagtcctgtgccacttaatgatggggatacattctgagaaatgtgttgttaggcaatctcgttgttgtgtgaaaatcatagagtgtatttacacaaatctagatggtgtagcccactacacacctgagctatgtggtgtagcctattgctcctaggttataaacctatacaggctattagtgtactgagtactgtaggtaactgtaatgcaatgttttttcatatctaaacatcgaaaaggtcagtaaaaacatggcataaaagattaaaaaaatggtacacctatatacgggtgcttaccatcaatggagcttgcaggaatgaaagctgatctgggtaagtgagtgagtgagtgagtggtgagtgaaggtgagggcctatgacattactgtatactactgtagactttataaacactgtacacttaggctacactacattatgaattttttctttcttctataataaattaaccttagcttaccataacttttttactttgaaaatcacacaccagggcctgttgtggggttgggggaagggggagggatagcatttggagatatacctaatgttaaatgacgagttactgggtgcagcacaccaacatggcacatgtttacatatgtaactaacctgcatgttgtgcacatgcaccctaaaacttaaagtataataaaaaaaagaaaactttaaattaaaaaaaacttgtaataacacttagcttaaaacagaaacacatggtacagctgtataagaatattttctttctttatattcttattccatacactttttcctatgattaacatttttatttatttattaatttttactttttaaactattttggtgaaaaactaagacagaaacacacattagactaggccaacacagggttagagatcatcgaatcaatatcaatgttttccacctccacatcttgtcccaccggaaggtcttcaggggcaataacactcatggagctgtcatctcctctgataacaattgccttcatctgcaacatctcttgaaggatctgcctgaggctctcttattgttcacttagaaacgaataagtaggagtacactctaaaataatgataaaaattatagtaaatacataaaccagtaacatttattaccataatcaagtatttatgtactgtacataattgtatgtgctaggcatttatacaactgactgtatagttttgtttacaccagcatcaccacaaatacgtaagtaatgcattgcactatgatgtgacaatgattatgatgtcactaggtgacagaaagctttcagctcctttataatcttatgttaccaccgtcatatatgccgtctttgcccaaaacatcattaaatggtgcatgactgtagttacaagaggtatcaaggctacaatgggagagggtagtcaatggccacagcggctttcttttacaagtttgaattcgttttatctaaagttaaggtaataaaaaaaagattgaggtgctgacacatgctatagcgtgaaggaacctcgagaattttgaaaatggagtgatctgtttgaaacacttaacccttaactggcacatacgaagttctcagtccatggtagctatgccagtagatttcatcattattgttactacttctaatagtgcgaatgtatataaaaagacctttcctacagtgtcttgcccatggtagactcagtaaaatgttagtgccactttctctagtgagatgtgttcttttccttttcattagaaaaatatgacaagtgaaaaaccatttctactagcaaagctggtaattcaaaactcactcccctcacattcattcacctgactgaaatggagacattattaaaataattcagataactcaatttcaatagataatttttccctttccaagaaatgactgaaaacacatttgacctccttgtctgaagtggccttggttcagggactttatccagtctgaggacaaacaggcattctcatcctagttgtgaagttacagaaatcatctgtttgcttcatctgagaatttatgtttttttcctttagaaggttttctgttatagaccacacggtttctgatttagtcaagttccagtttcttaatcattcagaaattctcaattcaattagacaaagttaatcatttggagagcctcctccttcctccttagtaaaatccaaaagctttggctgattctattgtggatcacttatcctgccacttcatggaataaatctacaaaagacttgatctgggaaacatgacagttaagatgtttgcttttccagtttagatttagaattttcttacatttgtatttctaatccagaaaccacatagtaactctctttaggagagagagacctgctttcataaatttttacatgggagttcagaaaagtcaggtaaaaccatatgacatatttaaatactcagaggacggaatatgaaataaacatgtatacatagaatgaccggtgtcagggctgactgccataacaatgcttatttattactgctgccagaactctgatatcagtagatgtggtcatttgaggtgtcgaaggtaatttgaaagaaggaaagcaaagactggtatgactgacttgcagaacctttggagattgtatagatctctggatgtttcgctggacagtatgggcacaagggtcaggcacgactccatcccagctctaagtagacaaaatgaacagagacaaatactttctcctattttatcacaccagccccatccttcactgggctgttgattctgtgaaatcccctcttttgaacctgtgatttcttggcatcttttgtcatttggtgtgtttcttcccacgtgtctagccttaatagattaaagacagtagatgagggatctttgttattttttttccctatcttcatctttcccctactccttactcacagggctgtgattagtaacacacaaagatgtcagtctctagaactcagtagccaaagaaaagaaaccacagagaggttgtgtaaacagaggcaaagagccatttcactttcaggaaagtgtcttgcataaagaggcatcagggagggaatagttttgaacttctcccatttttaaagctggttattcagcatagttgatcttaattgagacaacttgaatttccctgacactattgattcttcatttgacttggatctttctttttctttctattcccagtgacaataatctcattcagaatcttaccttagggcttagattggtccattaacccctatctactcttcttgactctggtctttaattcatgtacaacaagattatgttaaaattcctggaatataattttcgttatgctattgttcttgctatttatgaactaataatagaatcctgttatttttctgcttataagcctagaatgaatcttcaacatccacttagccctggcattcaagtttcatcataatctggtaccaagtatctttctagacttttttctcattacttttttttaaccttcaaaacgctttctctgcagcaaattgatttagttatcataccttgcctctcctctccctactctgtgcttgcccagccacaacccctagtgaatttcaagctactgacagttagtatttctaggaacaaaaaagccttactcagtgagacctatagtggcaacctcagggtgttaaaaagcttcaattatacccaattcattcaggcatccatttattcattcatttagtgtcagttttatcataagctcttttgaacaactaaatccagtggacatcaagacacactagacatggtgcctgacctgaagaacaaatatgtgtacctaaatgtcatagatggaggtgcacagggaatgagtgaatcttccagagagggagatatcagggaggaaaagcttgaaaaggaaggtaacgtttgagctgactgttgggatatgagccagtgttcttctgaagactatggaaaggacagtgtacctggaattggtgtgaggactgacagagagaagctacaagagaggaagctgttgcaataggcagtgatcagatctcaatgggcctcccttatatgttatgttaagaagtttggattttgttccaggagcactgggaaatcactgatagactgacctagcaacctatatttctggcttgggcacctatgtgaatgatgctgctattcatagaaagaaaaacataggtaggaagcacatttcaggggactaatagctctgttttgtatctattgagtttgaagtgtcagtggaacttcagaaggcagttaggtgctctggagaatttgggccagagacttaaatctgagaataaatagcctattatgttaatgtcttggaagtttgagctggattgagaaggtatgtggagtgctggtccttgtgctgtaagcatggagctaagagtgatccaagaaagtgtttgcaaaaagagactggcactggattttctctgaggtctctttctgctctaaaatgttatgattccatgattaatttgctaaataaattaatagtgcaaacagtatttcaagaggaatgtttaaattacttatgagaacaaactttttaagtgccctcaagcatcataaaaacatccactcccatagacataattgatacaccaattataaatctttcttagctcttcactcaagcagatttcctaagaactatgtttggccacattatatttacctagaagaagttcttgtttgtatttcaaagccatcaaacttcatttctttatacaacatgtttcagcctggccaggcccccagtagggttgaattattaaatttttatagtatgtgcaagatcaagtcttgatggattggtttttctctggagaaatgcatatcttcttcttaatttgggacacagctgttagaattgcagacttcataaaaaatggcaacatataactcagacagttcacagaaacatttcctctcaattggcatggtctttgaggacaaaccacactctaaaatgtttgtataacaggaaaatgtggtgtcaagatgatcaaaacaagataggaaatgatatattttcacaaaatttgcatacattattaaaaaataccagacagtgcacatacaaaataagaacacaacctttaaaggagagagccctgataaaaatgcaggcaaattaaatgcacatgtgaatgatagacccatgattagtgacaataaatttgattttctttttcagatttggggagaacatcagcaattctccctaccacagcaaaagcagatgaaatctgttattcttatcattcttcggttattttatacttagatgaaatgtgtgagttagccattctgagcctcagcctccttagctgtgaagtgcagaacatcaagcagagtcttggagaaatcagacggcacatgcaaactaggtctttaaaagagagtttaattagagactatttccagaaatgtgggtaggattccagaaaattctcagggatagcaggagcaaggatcctgccagtaagctctatgtagcagttacctgacatgctctgcaacctcagaagaggaatgtggtcaatctgtgatagcctgaaagggagagagcaggagatctcaccctgctcccaccctccacatctcctgttgttgcctccactggccaaacccaactggaagccagagatcaagggagccagttgaggcactctatagagacccacttcccatggcagacagcagggcaaggcagggaggagagtgaatctagagggtcataagaaagatatccaccatggtggatagtagaagtatcaaccttagggtagttgtgaagattagggaagaatggagaagacatgattagcacagaaattgacccatagtaagaacttggcttaacagctgagggtagtgacacatgcccatagtcccaactactcgtgaggcaagggtgggagggtcactcgggcccaggagtttgaggctgtagtgcgctatgatcacacctgtgaatagccactgcactccagtttgggcaacatagtgagaccccatctttaaataaataaatattagcatttaatattatttttattaacagaggcattcagttgtgtctcttatgacatgtttgatttttccttgcaggcaaggagccagttgtactacagctggtgtctcttgagtgtgagctagattgagtgtggaaggctggcccttgtaacgtgaacatacagctaagactcatccaagaaagaagtggtatattaatttcctattactactgttaaaaataacacaaatttagtgctttaaaaagaacacaaatttattagagttctggaggacagaagtacacaaagtcagtttcatcaggctaatgtttcttttatagacttccggggagaatcaattttcttgccttttccagtttctggtggtggccagaattctttggcttgtggcccctttttccatcttcagagtgtatcacgccagcctctgcttccatgttcacatggtcttctctctgaccctgaccctatggctcatctttttataaggacttgtgattacatttagggactacttggataatccaagatcatcctcctacctcaagatcctcatcttagtcacatctgcaaagtccattttaccatgtcaagataacataacagtttccagagattaggatgtgggtaggtttggggtgagggagggtatcatttagcctaccacaggcggattcaggacttctcgatctaagtggaattcacttgctgtgtgattaaatagctgcttctgaagattcctgtaatatccaatatcacagtcttagacttacaatcagtcttagtctcattgtatagggttccctatacaatgagagcccagagcaagggtttatatgtaggtagtttattttggaagtggtctctgagaacatgaatgatggatttagaaaagaagaaaggagggaaagccaattcaaggacacattattggcctgatcatcagcgtaggcagctagagctcagccaggaccttctgaagaaaacatagaaggtattccagagtagtctgtccaagacagcagggctggtgggagaacactagttttatcagtcattgaccaagagttgccctgtgggtgctaaattgcttgcacttcaaacctgcccattcgtcagtccaggaagtttccttcaggtgttccatgatacatcataaaagtcccagggctgaaagctagagatatatgacaagataaggtcaggaaacctggtttaaccccaaactaactggtttctgtcacagtgcctagaaagagtgatacagaagaacacgagatggggcacaaaatatgtctactacagtcagcaaggctaatggtagaggtggaatgatcttggattggaattgataaatgtggctcattgtgcagtgctatagaggatgccagaattatttgaaaattctgcccaagtgcactcttttcttagagagaacattgggtccatgatatgtggttacaaaagaaagctcagaagtgcttgcaacagcctgaaatgcaagcttcctttgaccatctactcatggtttgctttatagtctagtggagaaagccagcattaacattaaataaaagataatacgtaaataaatattttcaagtgttctgattttcatgtacttagtctgggagttagggaatctttccttgagaaattataactaagttgaaacttgaagaataagtaggagtttggataaaggtagcagcattccacgcagagggaagagcctgaaaggagtgtctgagtcagaacagagcactgcatgctcaagggatggagagaatccagcatagtgggagcaaggaggaaagtcacaagaagaaatggaaaaagtgggaggtgtggcacacagagacattatgcagagtctcatgggccaatacagattttaaactacatcttgggaagtcattgaagtttttttaaaaaaataaattggacactcacaaggttaaatttatatgtctgaaaggttgattggtggagctgagggggtataggaatgaatgcagtgagaaacacgagtgagtcacagggagagataatgattgatatactgaggacacaagtcactgtgattagagctgagccaatcatttctgaattctaatgtataccagaatggaagtgacttgtgtccaggaggtagtctataacttctgaaaaagctgagaagtctcacttcagattatggacagtaggtaggtcagaaaagacaaactagtcaccagcaaggctgcagcttgaatagaaaataggggctgcagatcttggctcaaaatacagaggaactttttaacagttggaacttcctccaagtgaaataggttcagaaactaaacacattgggaatattccagaagaggctgtctggctagatatggtagaagagatttctgcatttgggttctaagatccttttcagagatagtcctaggatttgtccttgactgggtagacctctgcacaaagcaggagctccaagagctattcagatcaatcaatcaatcaatcaacctatcaatcaacattttagtagattgaagtttaatatgctttcctaaaggtaagatttaataatgggaagaagaggattaaatgctatggtgtacctgaggtgtataaagagaggtattcacaggggttagattatacattatggaaaatgcgaaagagaaagaagagaaagaagatgaggaaagagaaaaagaaagaaagaaaaaagaaagagaaagaaaaaaagaaaacaaaagaaagaaaggaaggaaggaagaaaggaaggaaggaaggaaggaaagaaggaaacaagggaagagaaaaatcgcccagaacaagaagagtttgtagactatcattattctagaccagggtttctcaatcctgttagcatattggtttggataattctattggtgggagtgggaaggtgggttgtatgtataggaaggtgttaatggcatccctgatcttgccacactagatgccagtagaagccctgctcctttcacctcccccaagagatgtgccaaccaaaaatgtcccccggggagacaacaaccactcattgttaagaacctttgttctagaccttgtatatttttggtgccatcagaagaaacatagacaagttacaaaacctaaaaaagataattactttttttatttttttaatctcattttacaggtaaccaactcaccatttggattattggtttttaaactttgaaaatacttaatttacttgcagatagttttgattcattgtattttgattcaaacaacaagagagatgttttattacaacctgtcttctatctgagccaaaatgtttcacgtgtggaaaataagtcaagttgaaaaacaagttgagtcagtaggtcaccagaactgtgtgtgaatatacttttatgcaaattcacctgcattttgccactgaaagagaaacactgagaagatgaaaaggttggcactgatgaaataaaaattatgcatttttttcttcattttctataggccacaaggagtttaagtgatttcccatgatgtagaaaagcaactcctacttgcaaattagcaaatcacccatcctgcttctttctaaagagtgatctagccacaactggagatttctttcattgcaatgttgtctacatccctctccatttgattttcaacaccttagctgaaagaataattttttcaacatgcaaatctgatcatactttaaaacttgttattgtcttccctgtgctcttaggctaaagaccataatccttaccaaggcccctgccagcttcctccatcaaatcttaaactgcgtatccctgttacatgtgctttggccacaccagtcttgtctcaattctttggctcctccctatttcatcccttcataatgctttgcatatgttatgtgctttgtttgggaacctttctacagcttcttcaacttggtgaactttctctcactcttcagatcctggctcaagtaacacttctgtagagaaacctctctaaccaacatatgaacaaacacttcatcgttaaatcgtctcgtagcaccatatgtctgcttcatagccttaactgcattcgttactttatatttatatgggtatttgtttgattaatgtccaacccttccatttaggtgtcatctctgtgaagcaggaactacattcatttgttttaccattgtattctcagcacttaacatagtaggctctgaatgaatatttgtcaacttagtaaattaattaatcaattagtcaaaatagagtcataggtaactatctacattggagttcagcaaactgtggcccactggcctgtggcttgattttgtaaataaagtctattgagacacagccatacccatttgcttactgtttcctgtggctaattttgctgtacaaaggcagcatcgagtagctgtgacacagatgatattgcctgcaaagcctaaaagcttactctctagctctttatagaaaaagtttgccaactcctgatctaaatcatttatttcttgtatggtttattcaccagttgtcatatagcttaatcccaggaaaatatgaaataaaagtaacataaatatatatattttttcattgtcaaagtatttaataatagcaaaccctcaatgagcacttgctgtgtcacttagccattgagctaagcatgttacctacgttatttcatgaaaccctgacaaggccccattttacttgaaaaagaaagtattcaggttaacgttatttcccagaatcatgaagctgatgtggagaaatgtagaccagcatcagctttctgtttgtttgatttcattattaactggatgctggggagattggcacatggcagtggtttatgtttgaaatgtttcagggcctgcattccctcagactgtccaaaaggcagaggtgaatgggctaatacagtacaggatggggtagtaatgggatccttggagtattagtcattttcatgctgctaataaagacatacccaagactgggtaatttttaaagaaaaagaggtttaatggactcacagttccacgtggctggggaggcctcacaatcatggtggaaggcaaaaggcacatcttacgtggcggcagtcaagagagaatgagagccaagcaaaaagggaaaccctttataaaaccgtcagatcatgtgagacttattcactaccatgagaacagtatgggggaaactgccccccatgattcaattatttctcaccaggtccctctcacaacacgtggggattgtgggagctacagttcaagagtagatttgggtggggacacagcaaaaccgtatcacctggaaagtcataaaaacctactgtggctcttatcttattatggtgggtttgagcatgccaccatatggcaggattcttggtggcaaaagggaataagttgactaggaagaaccaaattgggaaattggctggagaaataatggaaagagcaacaaaagtgtccatgcggcactcataggtcccaagagtctaaagaacctgaagaagtcagatttggcagtgaggaaatgacagtcaagggacttggaaagtcaggctggaggcttgaaaacccagaaggggaaacttggaaatgaaagtaagaaggcagagtctgtatggcataggttcgagaaccctaaacaaagaatctgggcaaccaaatattgagttggaggcaaagggtctgagaggatagttacaggggaagaagtgagaatgcagcttgctgggaacttggcattgtgaggacccattgcctaagggccagaaccagactctcagagtgcaagactccaattctgatggtagagggaattttgtctacctggctacctaggggagaaagagaaggcaattcttgacaggtactaaaagaaaaccaagtctccaagtttatcgtctctctggccaactggctttgtctttcccttcatacctgttcctctttctctcctctgtatttatgacatatgcctcaactacccaagtttggtttactgacaccatttttaactccttctccttcagcaacccccaagacctcaccagcacttgccaacccagccagaatatcatacatcctactcatgtttcctggtcatggccaagttcccttttcccagttcattttctcacatcattggaattgcctggaatggctttacccaattttgccacctgaaaaaatatgaagttatctgacagggccagcccaaatgtctcttcctctcagtagcattttcagacttccccaacctttgggaagaatcgactccatattttctatgctcatagtgtttcttacatagaacttttataaaggatttatggttcctcaatactcttcaaataaagacaaaaccttgatgtggtcttctggttcctacgtaggtgtcaccccacctcaccagtcttgccctagacctcttctgaccttgacagagctttcttctgcctaaaaggctcgttctcttcttgccttgttaatctctagttttctttcagatcttggccagggagcgccttccctgaattctgtaactagatcaaatctcccattttaggctctcatagttccctgggcctcatcttcatagtcctgtagcagaggcagttttattgtttgtgcaattatttgattggccgccttctccatgtgttgtatatgccaagagttgaggaaacgttcctgttgttgctggcctgtatttctttttccccagcccaatgcttggctccgagcgggtactgagcacacagtgggatgaataaatcaataaatcaatgcagtatttgtttgcttttgggtctttctctttctcccgctagagagctcctgggaggcagggctgtaacttagtcctttagctcctcagtgtgtaccatagtacctgccccagggtaggttctcagtgtatttcgaatgacattatattccatttcagtgtcacaaattagcctgcagtttgatcaacagttgtatctaagtgcttctttgatcacaaaggtgcaaaacaagaaaatgtcatgaagaaaatgtgtccccatgggcttttctttcttctacttatttcttttcatcatcccatgtcctctacaacttatctgtcactaatagtgctcttcttccatccttgacactccggtcatccaaggagcatcctcagtgagtggctttttctccttctcttgaccttcaactttcaggatttctttcctaataattttattaaaatcacatttctggatctccttctcctactcctccatcctaaggcttttgctacatcatggagaccattatttgctttcttaattttgtcaacttaactttaccctcatcctcccacatagatttccttcaagaaatcaaaggatagtatcaagagagtaccaagaatgagaaaaagcactgtgttcttctatttgaagcaaaataattttaaaggaaaatgtaggaggaatagattttttgttctattttaaagcagaaggtgggcaacttctgctgttctttgtgtttgaagcaacagaagaaagtaacagatgcaattaagatttttgatagttaggttgtgaaacatggcatgaatcgtttactctctaatctcagaatgccctcctgctgaataagggagtgagcctagaccagtctttgaactcatgccagggtctcaggggaccccacaggctcatgcaagaggtgacaggtgactcctgggaccctccaggctccattcgagcttcgatgagagaggagttctggtgtagtttgtttgattcctgccctcttttcaatgcttagcctagtgtctggagcatagatatttgttgaatgaatgacaccatcttatatattggaatttcttgtaatattttatttgaagggaaaaaagttttattgattaaaaaaaaaggtgtgagaaccactggactaaatgctctgtagaactccctgtgctttaaaaacaattctatgatgtttagaacatcaattatataaaagtaagcaatatgatagccttgagataaaataccctgaatcattatgcaagatagcttttcttcatttcagaatcataatcaataaaatatgtgtaaaaaatcttaaagtaaaacaactgagcacttagacaataattcaatatatagtctattgtcttgccttctattcctttcagcttcaagcctaccttccccaggagtttccaggaaccacacaaaagcaggtctcttgcctcatgtcatttatgttcttagttctgaatcattcatcctgacatatctcttatcacctcccaactcctcataggatctggcagtaccacatgccccaccatgatcattggatgcactttgctatatgatatggtttggctgtgtgttcccacccaaatctcatgttgaattgcaattcccagtgttgggggagggacctggtgggaggtgattggatcatggaggcggatttcacccatgctcttctcatgatagtgagtgagtactcatgagatctgatggttttaaagtgtgtggaacttctgccctttctctgtctctctcctgccacaatgtgaaaaaggtgcttgcttcccgtttgccagaagtcctgattgtaagtttcctaaggcctctcagtcatgcttcctgtcaagcctgtggaactgtgagtcaattaaacctcttttcttcataaactacccggtctcttgtagttctttgtagcaatgtgaaaacagagtaatatgctgtgtgaaaatgcatccttctggttacactttctccggtgtgatattctgctcactatgatcctgctcaaagaaccactaacctggtagagactgttgaaagatgttttgcctcattaactgtggcatctcagacaccacaaaacatcaggtcttggacatcacatttccaagatcactccagaagtgacccaggaaatataaggattgacatgtagttcctgtgtttagctaacacagcactcacagacaaagccacccctgagatgtgtaacagatggtggtgacagtactgtctatatgctctcatggcctggtcctgtggcttaaggtgtttcttcctgcagacttcacatgtaaatatttgcatcagttatctttgcgagtaacacagtcatttttccttttggtggattttttaaatgagtggatatattttgtggagcctaagcgtcagattctcagtaatacagtgagtctcagcctgatggaagtggaatcagtgtcattttcatcttccttgtatctccttgcttcttattttccactctccttttgagaacttccccccatcccatgtggctgcaggggctgtcagtcataatccctgtcctttcacacaatatgcagccgtgggaaggctatatgactcagccctgccactttattgtaatccactgccatggaaatggggatgagtttgtaagctgggtacatgaccaatcagggccagccaaagacctttcctgggactggtaactgaatgctattacaaatacacttctcattctgtcagatgtctgcacctggacgctgtgggcttggggttgccaaggggtttctctccatcaaacaggagaccatctgccagaagagaccaacactcagaaagaagcagaactgagaggtggagacctgagaacctcattttactgcagatttcatctacccacattatgtgagctagtaaattctcttttttgtttaaactatgttagatttctgtcacttgcaaacaaaagtagtttggccaacacagaaactggcattgccagtgacagaccttacactgtggaactacctgtgttgagacgaagtagaaaactgagagtcatccaccatcccaggctgggaagatcaaatatttaccatgccctagctcagtagctaactcattatcacctctgggattttaggactcagactatgagcctaccaagtctggagtttcagaggatttgctagaaaaatatcagaataataaagagtgttgcctcttttcgcagtattcactattgctctgaaaaaagggacaggttggtgggttaaaagcagagaaagaatagcagacatctgttgattgccagaaagccaagaccactaagggcaagagaatcatgtatttgtggaattgcaaatgtcaaaatatctgtctaatttttaattcaatgcagagaaagacaggagattatattgaaaccagagaaaggtcagagaatacagaaactcctcccaaatacttcctgcgctgtgtcactcctgctaaataaaggtcataattacccctatacaaagacctcatccaatgggatacagcctggccagccaaggacagattagctctgcctcaccactccaatttattgtttcatatagtcctaaagcagtgaccaagactgacacataaaacagagagctaggagcatgggcagagaaccaagattcgttgctaagagacagaaacttgaaagacaggattcagatttacaaattgtgactggccaagattgctggcattggttccaagctaatagagttttcctagaattgattcaattaacaacttactggggttttaaaaggttatgctatctgagaaatctcatgtctagaaagtgacctgggattgctcaacccctagggcaattcccaggcctccataaccatgccttcagtattaggctactaaagagaccctagcatatccctctatacacatctcaagggcagccttagagttaaatggccaagggagagcctccttgtaagcaggactagggatggaattggctcccgttgcagccctaggggcatgcattcttatgacacacgtccagcaggatacggcatgtggtatttatattctttcctcttctctactcaccaaatggcagtctccattgttattctgtcttcctctgctattttatactgggtatgttgagggtagttaactttgtcattgagccctaggttctactgttgtgagaaactatctggatgtagtcagggcaaggtacatgatccagatatgccaaactgggatgtgattttgggttgtgtctctttagggagaaggtgatcaaatcctcaggtgagggcacctttgaaattatctgtattgggtaaagattaaatgtgcatgctgggagagcaaggggtggaatatagtgggcatctgtttttgccatcctgggatgtcttcaccctttttctagcaataactcctctcattttcctggggggaaattgtcccttctcattccaagtagtgttaatggagctcttggccaaagtactctctggccacagggatgggcaggcattgtagccttccttttagaaataatcattggtccaaggagtgggtacatgatcaagcagtcaaccaagagtccttctctcagattattatatgggctcttggagaaataaagttactctttcttctggaattttagtatcagaatgttctaggactggggttacagtggtcactttccccaccaaattgagagaaacgtttatagaaagaaagaaagagaagcagaggtgagagagggagggagaaaaagagaagaaaagaaatcccaagagagagagacagacctagacttaatgactgcatttaagtcccagtcatttctgaaaaatgctatatccccaacttcttagttacataagccaatacattttctattcgtttaagctagtttgagtttctgctgcttgaaactgagtatcctgactaaccgaattggccattgtgtatataaatccaggaagccccttctgaagattatatgagggatcttaatagtacttttgttatgccaagtagtatgaaggttaccacttactaccacacttagattattgggtcagatagctgctctacctgagtaatgcatatacgcaaataacttgtactgaatcgatatcatcttgctaatgaaactctactaaggactctagaaccttccatgatgaacctttttgaactagggaggtcagcaatctagaccatcaattgaatcatgtatatggccagaagattggttcatcttacaggcacctcctgagactcaggatgaacttaggcaagtaggagaagaagactcttcagagactcatctaagcaaatccactaatactacaagaagctgttactaccatagtacagccaacaactttgtgcctgaaactctttgtactagggaaccccaagcccacttacaggacattagaaatgggcaagcttgccaggcatggatccgttttctctcttggcttatcatagcttattgccattatatattctgtgtgtcgggtctcctttcagagacacacagtgggtaggtcccatggaattatggtattttattaaccaactagaacaattgttaacctactctaagactggacagagatgtttgaccagtatctgctgctgtaacaggatgtaagctttcagctataatccactgttgtagtgccagtgtggtggcaagttttagggaagagggagtgttctataatcttccaattgaatctcagccttttagcccatctgagtcttggaactgtgaccctccccagtgtttccccatagatgtatctttcgctccctccagaccagtcctttccaatctattttcttgaagctctggctgttgattgtgtctttttcttaggtgagacaggaaggctagggaaggctgggatgggagtaatgaccttcccctagctgggataaggcgctggcaaagtcttttttccttagatagtaggcttttattatggagaaggctctggagtgtttcaccacatgaatcttctccgccccagagcctagaggtcatctttctcagatcttcatcttgagaacctgtgggattcttagaaagaaagcccatgaaggtgtgggggccatgtctaagactgtgaccccaccccccaggggtttctcactccctattactccacactcagcctccagaatccatcaaaatgaccatttaagtgttcctaccaattcagggcttcagcagcttctgttccagagaagcagatcttggttatgtctctctggatgccctgactgtccagatttcttggtggcagtttgttctgcaacttcagttccctggaaggtcgaagaaaagtaatcaattttcagtttgctcagttttttcttgtcacataaacaatagtgttgagctttacatgttgaagctgaggctgacatcatgtcacaaggtgaatttctgtttgtcagttccttcttggtcctccaacccttatccccttccatggttgccacacagcaggaagaaaaggcacatggccacaatcttcacaccttatgctaatgattcgtggggtccctgggagccagacacttaggtcaaggaagtcaagtgttgtttctcagttcaacactctgtctgcactggctataaaccagggcactatcaatctcttaaatttccttcaacacttgtcaagttacatcacttgttaatgagtcaaaacatctttcaccacagctccaattctgtgtgatagtaattttacccacaaatcattcctctcactcccggtttgccacagtcttcaatgggtaaatttctctgccatttttgttattgtaaagctctaggcttggaaagaaatatagcagcacagattacaaagagaccaaacaatttgaatattttaactttgtgattgctcagcaaggtctatatgacctgagagcatttggaggaagtataatgcctgagatgtcttgaaatgatatgaacttcccattacactcaagggtgtattcagcccttagactctgcagtgcccccatcatgacgttttcaaacacgttacaggatgtggagttttaggggaagaggcaatctattggtgacgtattggtgtaacgggaaggcaagatcaaattgcaattttctgtagatgaaattcagtttcaatcattgtagtcttgtctgtcagctatcgtggttgaaatgaaactcaatgcgtgtgatttgagcatcattctaccgtcacatgggttgatggctaacacattttccaatttttctgaatattagaaaaatacaaaaaaaaaaagtggaggaaaaccattattttatattttaacccttaaatctccatatctccttctttaatttaaatggttaattgtaagcattttcaaaacttagtcgctaaactatcaggaacagtttcaaatcattgtggctgtatttcacattagtacatttcgcatggagaataaaaagtactgaaaatattgctcaagtctctttattcaccacaaggtaaaaagctgaaatatacccatgatgatagtaatctgaatgagcacacagtttacagagtatatgattagaagcctgggtctggctcatatgtgaggagcagttttatcctaagctaggatgtgagagttatcttctgtcactccttcaatcccaaactgaaacatgaatcagacgagaactcatttgttccctactgcaagccactggacaggcttgtgagttaaaactgtgatttataaataaaattatatattgttggtattgctctataattttacctatacctaaccatggagccttctgtctacctacttagttgtttgccaccctagttagtaatatgcagtgtgatttgggttcaaggatgagtaagaatgatggcttggattgagttcaagaacttctttttcataagtgtttttacctaaacaagggaaagacttgggtggttggccacaattccccattctgcccgcacttatcatggaaatacagctgtggttggtggtctttggctgtgtggatgaagtgagatgcccaccgggccagagaagcatggactccaccttttatacccatggccatcattttacccagaagcaacttaacctaccatacaaagcaacaattctgctgctcaggattaatatagattctaggccttggatttttgttgtaccaggactggggtaaatgccacttaactacacctgcattagagagttgaggaatcccacgcatgtccacttggggactgtcttagtgcattttgcattcttataaaggaatacatgaggctggatatttataaagaaaaggaatttgtttggcttatagttctgctttagatgagggcttcagggagcttctactcatggcagaaggtaaaggaaagcaagcatcacacggcaagagaggaaggaagagagagagggaggaaggtgccaggctcttcttaacagccagttgtcatgggaattaagagtaagaactcactcactattccgaggatggcaccaagacattcatgaggaacctgtccccgtggcccaaacacttcccatcaggtcctatctataacattgggaatcaaattttgatatgagatttggaagcgacaaatatccaaactctatcaaggactttccctgggctgctacaggcatggcctatgataactattaacaaatacatgtggtgctttcaaggaggagctcagttcttctcctttcaactacttaagctctacccaagcatccatcttcacattcagtgcttgagaacaagcttgacttgcagttgctgccaactgagacaactcctccagagattccatcttaaaaaggacatgtttttctcaatagcatcaacatcatcttcattcatgtcttggcacttctctaggaaagcatgtagcttaatactgtacagaaatagactggcctcccactggacataggagacatcttggtcactccctcaaattcctcttggctccaaccagtgctgtagaggatttgaccatcttcaggcagttgcagctagacagtaactcactttaggcctgtgccaaatatttctcgcttttttgccttgagtcttctctgatgttgcagcatggaaatcccagaaactggcctggaactcctgtatgtttaacctggaaattcagggagtgcttgggaccattcttgactactggggaacagaagccattggtaaatgcctccctctttgatcctctggatagatggtctgagccatatttgcaaggatcttcagaaggtcttggtgggctcaaacaccagttgcctacagtcaatcaatagtcttcatatcaactccttatactggctttccctccttcccatttccactatccttgccttgcagtcctgctccctaaggtcacattcagaaattaactacactcaagcaaacctttgtctcaggctctaatttcagggaaacccatgataaggtacattgatacaaggatccaaattggaccctttgagtctcgtgttaagatgccaacttttccatctctgtatcatctgttttctggaaagtaagaatctcctttcagtatcattgagttgtctaccataggacccttgtggaaaatcttcagaaagaaataacatatgaaatgtggttgagaggaaataaccttgacgggaataaactaaagggtgtgatgactgtattaggatcctgagggggaaacagatggcatactcaaatcaggataatttgaggatggcttatagacaaagggacctattccaaagatgtaggcagtgtgcaggggaaccataagagtacagcaggagcccaggttagcagctgacggtccctttaggttagagttgtcatatcaatacaggatgccccattaaatttgaatttcagataaacaatgaataatctcttagcataaatatgacttaattattgcatgggacatccttatttttaaaagttcattgtttatctagaattcaaatttccctggccatcttatatttgtatttgctaaatatgacatctttattttagactcaaagggaagggagaagacgagagaacttgtaaagagagagtcatatagagtaggctgctctgagacatgcggtaagcttctatctagggatataaggtaattccaattcaagtcaaccacacagggaaggaaccagagaataaatactgagatctccatctcttttctgcctctggtctcctgccagggctcatcactgactgaacccaaccacaagccagcgggcaggggagcctgtggatgcaggccagcaagtctgcctctgtgacgaggagcagggtgggaagggtgcagcagcatctggaggggcaaatggaaagattcagcacagcaggcattcctctttctgctgtaagtgtgcattctccaagcgttacctctgacctaagtgaaatcgtaggaagtgacatccctgacattcctagaccaggaaccaggctgtccgatgataattagtcttccttctcggctacaccatttcatcattcgatgccctgtgtctccatggttctatgctttggtaattctgtgccttttattagaaaaagtatcaagtcttttggggtgggggtggtaggtgggtgtggataaaataaaaatagttttctttttcctatgggagctcttttgaagcaaacatgatatgcccagtgtcataattctgtaggttctcttttctttaattctttcactttatctctttattacctgtggcttttccttgtggatcatatgtcacagcaggttggtaacattcgtcaatgttgagagacattttaaaatgctcatatttgaaatgacctctgtaatctctagcttccttggcatgaagcctgtggtggttatgttcatgtcctggttcagatccattgccacaatgtcaatattctaactaggaatgatcactttattcccttgttaggcttctaaagtattttctttattactgtcactagcactggcatttggctttttttcagggctgtttacatgaagaaacaacgttgtagtcataccttgagtgagttgccacatgagcagcgggcaacaaagcagtgcagataggcagatgctagcctccaggactagcgaaatgactcattctctctcagagggcatgattcagattcccacttcagaatgtttcaaagtaataacttgctaaggaacttcccaggttacttttcaactgttgaaactgttacagactcaagggtcaggcatctatggtaggagcaacagcttgtgcacttactatgtacaggtttctcctataagtactttgcatgtatcatctcatttaagacccatgacaaccctccgagttaggcagtatcattatcctcattttataggtgtagtaactaacgtattgagaaattaagtaacttgctaaagttgataggcagtgtgttaaataatatagctctttatttctttctcacataaatgaagcctaccaggaggtaggatggcattgatgttgtagcccctcagtgacttcagagactctgttctaaatttctgcacaccatcctagcacaccatttctagtatcctggtcacctcatggctcaaaatggctgctggaactccagccgtcacatccacattgcaatttagaagcagaacaaaagggagaaggacaaaaaataagccatctatcttatttatatctcactggacaaaatttagtcctatgccacaacctactcctatggcctcacctagccactagggtggataggaaatagtcttttattctacatggcaatatgcctggataaaagtttgaggtgttctctaaagttaaaatgagagaatggatataggggtaaaaaagccaggattcttggctactgtgatgggctgggtttgaatccgagtcattggaatccagaggagcccctacccttttgtgactataccatatccacacttgggtgctactttataatatggtgctatttttttttttttaataatatggtgctatcatggcatttgcccagtaagttctcttcttggctttcagtatactggtcattagcatcaagtgagtaaggactttgataaaggctaacttcttagcagagtaagagttctgacaagtgaccagtgacagcgaggagtagggactggggtagaaggaaggtgaggggcttagcatgtggttcaaccataggcctgaaacaaactgcctagctatctttttgtaaaaaaaaaaaaaaaaaaaaaaaaaaaaaaaaaaaaaatctcaggcccattggacctaaaggaaaccaaacatataaagtcttatcatctctctgtcttcatttatattaatcacttctttaaatacactaattctcaaaagaaaatataaaatgcagaaatttcacaaaactcatgctgataatggtaatgaaaattctatcagcaaaagcacgttgattaatcatatacatgcatgatttttctcttataccatctgtttagaagatgaaaaatgtattctgctggtagtttggcataaaatatatttatagaaagattttatttatagtctgccagtggattctgagcctgccatgacatagctttcagaactaggtaggctgaaatgttcaaatattaatgccaacaacattcttatcattaaaacatgaaagttaaaatgttttcatattcagttcatattttggagtctgtgactgcagactgaacagtctatttggaactcagcttaaaaacattacaacgtaatttgatagccttggttattctcagcggttgatggtatctaaattattctggttagccaattttattttctggctatccagcattaagaaaaacaacgcttatctcagaaaacatttccagagaatggaatacatgtaatcactgatttttagtgatgaagagttcacattacaggaactccaaagtaacaaggaaaactctacagggtgggattgagatattggatcttgatattaacacattagaagcagagagatgattaaagaataacactagattctctctctctctctttaaaatcgctaacccactgtcatatctttatttacacacatattgtataagttaaaattacagttgctcttgtttataccttaaatctcaaggatgcctatgtaagccaatgagccacttgaggcaagagaaaaaccctgttgcttttgcgggttttatgagaaacagctggggcacttagacttgggatattctggaaggtggttgtcctgctcttcttgactacttgcctcaagtatcactgacacacagcaaaactatcctccaggagccttttcatggtctctattgatctaaaatattgttattttgaccctaaggaagagtctgatgtgcagtggagtcatacatcctgagatgtgaggggtcaggcatagaaatattgaatgcttcttgttatcaataaaatcaggtctttttcttaacctttcaagcaataagcccaatagatatattaacaaataacaatatgagggaaataagctttgtgttgtacctaagtccattcattcttaacctccatgagatttaaggcagatttgggtgggtttctgggaaaaagtcatgttacttaagtaaggggaaaatatcttattcatggaaagtctcttctttaagaaccacaaattgcatcaataaaataatcaatggcacacagcagctaacatgctcaattcttcacctttaaagcggcactctttctggctctgtgaggaagagagccaaaagttagatgctataaagacaagcatatagaacatgtggtagaaaatgccaaagatttctccaagaattctcagtagcagaacccctgagcccatgttgagacaggccctaccacaatgaaggtggacttgattggtgataactgtgggaagcattctagtcctcttgtctgaccttgcccagacttaaagggacacacatcttgtctctgcaggcatctgctgggtttcccccaccaccatcccctcgccaacctctcactcacaagacattaaacctccccgtgttgagtaccttgtatcaggggcaagcttagtcgttagtgatgagtatctactgactacaatcacttcacaggccctgggctgagcacactacaaccgctgtctcattgaatccttgcaatcgctctaggagggatgttttgggggaatttttggtcaaaaaataagagactcctttcaggtcctgagctgataagtaaattctttttgtatgacagtgagcaggaggttcagaattttgagacaaataacagagtcagaaagttttattttgtttttcccccagcaaactccctttacttttgacttcaggtcacattatataacaatctaatattacctgacctggtttttcagccttctgatgctgaaatctctctcttaaagtgatgaaaggtttcaaagctctgaatggagataaaaatctgtttctgccttcttcaccatccaacacccactctttcttaggcagatctggcaaaaatatgtttgttcacaaagaagcactgtggacacaacacagtcgtcacagcttccccaccttgaaagagcagcttccctgtgacacctacaaagactgacatgaatggagtcaagctgcagcttctcacttggggcacagagagagaggctgtcacaaagtagcaaggatgcaaaacatgacaattgtctcaggacaattcaaaacaaagctaaagaccaccccaggctctactctagttcccttattttaacttaatatattgttttgttgaaatagagtattttaagctctgttttcctcaacagctttgtaaattcaatatgttcaaagaaacaggaactattgtcacaaatggccaaaaagaagtcctggcctgtgtccctaggattgccccagggtctcttagcccacagaggcactttgaacattacgattttacagatactgggatgaggcccagagagcttgatgagatttacataatcagaaagtggcagatgagggaattaggactcaggtgacatagttttaaaatggttttctgatctactactatactatactgtctcttggaagccaacacgtttgcatctttacactgaccagtgccaagataatactaacttaagagagaaccagacgggtggctctaaggccaaaattgggttaagggtccattgcgtgttaagttagaaccacagaagatttgctgctgatactctattagaattaatccagtaaaatgctcctaaagtctctttagttttctgggattgttcatttgtcaattaattttctttcaaggaaactttaaaaaaggtttttaaatttggggattgagggtggagagtctaactaaaggtatcacttgtcctatatatattaaaaaaagatagtctaagcccacattcctggaatcagaatgaggcagaaaattggactgagttcaaagaattgtaagacaaatgattaggagcttggcagaagtgaatattaagtaaagagtaaaattaccgactgtgtatagttagattaggccagagtatgaagtgggggaggagggtaaaatagatggagctctttgagatttgtgatcctcaagtaccgctcccagggatcgaacggcaaatattctgtcaggtgactgtggatttaataatcaaaagtcattcttgcctgtgagctacatgaaagcaagggcggcactgcttcatcaaaatggcatttccttggaaaacacactgtaaataaaaagtggtagtaaaacaggctatacttataaatatcataacgtgtgagttttgtgctggaacaaaatgcagaaagtttgttggccatatcccaggcagactgaattgccctttgagagagactagagtttttttaagcacagggctacctaaatattctcccagtttccaactgctttcttcaactttttcctttgccttgttctttcttcctcaagagggcaccaacaccccatccctagaaagggtgctgctatgtgtggatttcacattgaatgttgaaaacatctctctacaggaaagaacctggttatagaccaataaaccaataatgagacttcctatttagtttcaaatatctttaaaaacaaattgcattttgtttaatcccagactgatcattaaacaaacaaacaaaaaaatctgttatatttgggagaggagaactgtgagattatgttcatggtctcaaaataagagaggcaaagttcagctgaactgcaacaattagacatgattgtgcattcacatttgcaggatatttttcttaagtcttggtgggagcatgaaaggagaccttattgtgtgtgtgagactggtatacaaaccagcgagcacacattaatgacaaacagtctttgttaaaacccaggcagcagatatgttagaggtatgccaaagaaagcttaacattcctctgtcgaacatgtagcacttttattttggtcgaagaatgctatagacaaaggatatagcaacgctgtggactggctgcgttcttttaacatttgctttcatatggaataaaatgcgtaatttctcccaatccttatctttgtctgggtggtgaaattcataaatagcatgagtaccacatcatattttctgtacctatttgaatggaatgaagcaatgttgcctacaggttttgttttggattgtgagctaatgaccacatgttaggagccactgtttacaaaagtcatttccatagtgtttactgctttgaccaaatgaaatttacaataacttaaatctaacatttaacgatacacataattgttattgtgccattatattattaggcataaatggaaagcagtttacataataaatattattttacccagaagaacaagagtttggagttttactcctcattcagcttgactgtggtcatagatataaaattataatgatattgtcattttactctaaaattatgctttcctccatctcatttttttcactttttccctcttctgtctcttctctttttctttatcttagtaacaactgtagtcatcattgttactatcatcatcttccccgaacactgacatattctgatatccacgcatattgggggtgagagctttggatctggcttccaaagttgggagatccttggtctaagaccctccgtcctcctgtgcccaggggcaaagttctcagggctttgcttcctctacctgtacttaatccctttgataacctgaattaatttctggggtccgctgtaagaaattagcacaaacttggtggcttaaaacaacagaaatttactctctcatagttctggcggccagaagtctgaaatcaaggtgtcctcagggccatctctgtctgaaggctctaggggaggatctctccttcccttttcctagcttctggtggttgccagcaatccctggtgctctttggcttgcctctttccagtctcacttgtgttgtcacatgggattccctctgtgtgtctgtgtccaaatctccctcttataaagatgccagtcctcttggatttgggacccaaatccaatataacatcatcttaacttgatttcatcagcaaagaccatatttccaaataaagtatttataggttctgggatgacctgaacttttgggggacactattccacctactacatactcccagccctatgccacccccttcctgaagggggcgatctgcttcctgctgctgctgttcctcttgcctgtttttcttgctgccatgttttcacacctagcaaagagccgggtgtgactgaatacctatttgttaaaagattaatgttccagaagcatactttctaggaggcttaaaactgcaataactccaagatctgaaactgtggattccctgaaaaggggagttgtagagaaagacgagaacctaggccaatggtgaagccacaggagaatgaggaaggcatagggggaaagctgaacatctgggagacttagaccagggtgttgaaaggaaagcaactggcgtcaagaagtcagggcaaggatggaggagtccgggttgctagcacatgattccctagtcctgagctatacacagaggagacggtgcagtgagagatagagcaagacagacctctaaaagtatccattatgctcggatctgtttcctattacttgatactttcccaccaagataaatctccaccaacttgttgctgcttttaataggaaagaaaaaattttgaaccaaatatgaccaggacaattaaatctggttaaaatttggtagaatggcacatgccaatggttgctcctttgctctttttcctgagaaaaagatatagagtggggcctctaggtgagatggtagacacctgatggaagaatggcagaatgaggagaaagctgcacattttaggttttgccgagtctatcctgcttatctctgttcccatggggacatgtatagacgtgtttcatatttagagcagctgggctgaactacgtctcagcaggtgtttcctgtgaaaggcttttcagattatgatgatcaaatcatatgcacagtgtggtaaaattcatgggtgactcatggatgccacaaaataattgtcatatcatgtttatttaaaggtcttgaaagggcttagaggtcacattcattgtggttattacagaagatttttcaaatgacatccatcaggtgatgaaaagaaaatcctaccaagtcatattttaagtccagaaaagaaattttaaacaactggatcttctgggcaacattttttgtttgtttgtttgtttatctgtttctttttgagatggagtctcactctgtcatccaggctggagtgcagtggcacaatctcggctcactgcagcctccacctcctgggttcaagcgattctcctgcctcagttttccaagtagctgggactgcaggcatgcaccaccacacctgactaacttttgtatttttagtagagacggggtttcaccatgtcagtcccgctggtctcgaactccttgcctcaagtgatccgcctgccttggcctcccaaactgctggggttataggcgtgagtcaccatgaccagcctaggcatagatttattgcatagattcagtgatccctcctgatccagcaccttcttctacctttgggaaaatggaggcctagggagagaaagggatttgtccaaaagtagcacagattattacaaggaaagccaggactcagacccaggtctactgagcctaatgcttcttccactccactgtgctgcaaaattgtcacagctgtcttaaatttagctatcttctaacattctttagagtaccatagtgatgatggcctttggatttttttcaagcaaaggcaacatataaaaagaaaatgaaaataagaaaatttgtctattaattcatcatatgcttattgtgagccaattttataccagatactacacccagtgctgagttattatttgaacttctgatccaaagacacataatgcactcttgaagactgcaatctcgaattttggtcaacattcttgccttttttttttttttgagacagaatcttgctctgttgcccaggttggagtgcagtggcacagtctcagctcactgcaacttccacctcctgggttcaagcgattctcatgcctcagcctcatgagtaagctgggattacatatgtgcaccaccaaacctagctaatttttgcatttttagtagagacacagttttgccatgttggccaggctggtctcaaactcttggcctcaagtgatccacctgccttggcctcccaaagtgctgagattacaggcatgagccaccacaccaggccagcatttttgctttcaacattattttttaactcaacaaaatattttctacaggttctgttgctctccagtaaaatgctttcatatttcatagtagtgggcgagaagagggcaggggtgttgggtattggttaggtcctaatactaggtggtgaggcccaagcttaatgtaagatctcctgaaggccaatgggaccaaaataatcccactaacctttgatctcttagagggcatgtaggagccattccatgcatcaccttccaccccagcttcacattctcttaggtaaaggtataatacatatttggactaaaatgtaaatattacaaattgttccctccattttctgttccttctacctggctgtacctctaaacacacatgtgtgttgggtgggggagcaagatgattagttaaaacattgaagttgtcctaacatattagagctgaattttatgtgctttctttgtaagttatgcctatgttgctagcaagatacttgggagtcaccttcatgctttcccttctaccatctcatatctatcataaagccccatagattcttcctttaaatcagctgaaagcttctcttattctctatgtctactgctgtaactatagttcaggccgttgttatcacatgagagagaatgtagcgatctccctgatttagttttgttccttcactaatttctgccatgccagacataagttatgtcttcctaaaacatcagtgtcatgataacatttgtcctgaatgccacccaaaattggatggcctccatggctagcgatttgcttgtcaacctggcttgatatatgaatcatcaactaatttattctcaagaatctataattgcctccccttgctttttgaatcaaccagaatttaaacattcaatacttttcttctactctaattttatactcctaaactcgccttaatgcaccctctcttcttctcggattggccactgccccatgcactatctttattaatgtatttttgcttttgattatatggcttttgtctccatgcccaacctctttccatttagataattgtgtcatctattttaacctacctgtactttcaaatccattccaaggaacagctcctcatggtgccatttgtagtcactcttgtcaataatgatttcatcccttctggactatctgtaggactctctaagaatcataaactatagaacctgatgatatttaatgtaaaacttaatgatatactatcttgtattattttgcagttgttttcatgcatatttcattcataaaatagaaatcctaatacttcccttgaagtattggcacattaaatgtaaagtgcttagaactgtgtctggcatagagttgacttttgatgagtttccatctccttctgttttcctttttcagaagattcaagttatatctgataattttattacttctatagcagatattagatacaatcatacagtagttcttaatcaattcttatcgaccagaacacagttgacctagagacccacacccttgaatctgacatcaaatatgtatatttatatactcttgggtcataatgttatcaattttaaaaatcaatattctcaaattatgatacctagtcatctatttattgccataaaatttcatcttactccacttattagtatttaaatttaaatattagtctggaacatgtgcagactaaaattctgtctgttgatggcatagcattgtcattacccattatggtctttgctttgagacgtgagtgctgcaaagccagcaagccttgctgaaagtgcacattttctattttcatgtttgccttccttttctgttggcagaggaggaaaccagagctccagaaattaggaagcttggctgaagcgagtccagctttccaattctcaaagcccttgtctggacagctgcccttctgaggatgtagtcagtttttactcttgcttttaagagcagtcttgttctactcagatgttctttcacaaacttttttaactcactaaaattaaaacatttgttcctgacttcccaaacattatttataagctctcaactgctggacagagtacacaattattccttggaataaaagcactccaagtcatatttatttcagtttctgctactatccatgaaagctgttttaattttctgtatagtggtaagattcatgctgcaggcaattatcatcagccatgtatattttgaaaacaatccctagtttggcaatagttattcctaaagtgatatttctttgctagacagcatcatacaataaaacagatttttgccaagtattctaatcatccgaatctaagacaacatattatttatttcaaatggtcagtcgtgttccaatcaccattgcacattagattagaaattatccagttggtgtgtaaacattccgctaatttacctcgtgtctggttcttttatttgatcttcaggaatttaaataatttaatgtttagctctcagttcaacctttgctttctggatatttacttggaacttcctcgtgtttatttaaggatattagaagtgcttggggaggatgtttttactgcccacgaggttggtacagctatgttgataatgtggcagtaggtttacaacagtcttgcctgcttggttaaagtgattgtctaatttcttccatcatgaacccatctaaggagcttagctctgttgagcaataaacaccagtgccaccagactggcaggcctgaagaaaactagtgagacaatcacattcctttagcgtgctcccagtttccaacgttaaaattttatttatttttcctccatggtttggaactttagagtaaaacatatctagacacttccactttctagccgtcaggccttcgacaagttactcaatctgtctgagcctcagtttcttacctgcaagatgggaataagatatatttttcttgaaaagattattgcagggattaagtgatattggacatgtgaaagcaccttgcaagactttaggttatttttctctcaaaacagttcctttttcttgtgtacttactagaaacctcttatttatttaagtgtatgacagtttacttaaatatatgataatttgcagtcaaaaagcatcatttctcttctcttgttataggcaccctgaaatttcttttgcaatctccattttccagatataactcattctcaaagacctgaaactcttcacacactgaagtataaattactggtaacaacctaaactcttaatctataaatgtgaatgtttctcccaaggctttaagtttaagaagtgtctgaacagctatagaattataggcattcattcgattgtagattctttccatcattcattatctgagtgcctactatgtgtcagggaccttttcagctgctgcaaacattgcaatggagaaaacagatgacaattcctggccatctttcagctaatatctacgagataacagctataatagtggctctgaccagatccaaggtgaccagcagagaagcagcaacacagtaggatgtggcaaaaatgaagaaagcccagaagctcaggcatgctgaagcagagatggatttcccttttctcatgggccaccccccaccatactcccggcagcctaaaacatagctcttctatagccagctggggttaagggccacttttacagtttaaaatgcttgaaatatagctggtggtaatggaggatttgctttattagttcatttttatgtatgagagaaactgtaatagaaaaaaaatcagtgtgcatcttttttcaatttgagtccaagagatttttggcattaaagctttttcagtttcaaatgttccaactctggctgtatttatgtgatgccaaaccaactagttgaaaaattacaagtatgggaaattagccaagtcttttgtctacaaactgccaaccaaccaggttgcctaattttttttttcttcactgaattgtcccatcattcaactgaattgactgacaatggcctgcgagatgcaaacaaagcagaaaatctgttttgtataattcaaagtattgattcattgttgtctggtagaatatgctcattgtagagaatacatataatacagaaaatatcagaaaacaaaaatcacccaaagtcctatcatgcacaaatattgatatatacccttgcaggattttcatgcatgtagacatatgtcacaaaactggaataatgctctaaatatgattttatcagatttttctctttttacttaatggtatattataaacatattactaaatattttttaaaaccatttttttttgcatgtctttcccatatatgaatgtaccatcatttatttcaccaatctcctatgggtgggcatttgggttatttccaattttgggctattataaaaattcagtaataaacctttcttgaaatataaatttttgtgtgtacctctgattattacattggtacacaactttaaatagaatattttcaaactcttaatcaacattgccaaaacctcccatcaacatggttgtagcaaaaattatagcagatttatatcctcacatacaagcatgtttataagaatttcccctccgttctcctgccaatttttaatctttgccagtttgataaatgagaaaaattatatttcattgctttatttatagttcttaaattactaatgagaatagacatttttcatttttattggccatatgtattttttgtgatcattcttttattattattttattttagattcagggggtccatgtgcaggtttgttacagaaatatatttcataataatgaggtttgggcttctatttctaaatgctttctcttcaaaatgaggaaatgcaaataacagcagaagattaacataatgtttttaagtttccatctccagaaaatcaaagaaagcactttaataaatgtttttctcttcttcagaaggacactaaaataggaagctttcctcattttcccttgtagcaattgtttttgaatttactaattaagttctaatttaagaaatttaataaggtgctagagctaagctgaagaagtttagaaagataaaatttctgcccagtgggtttgggttttggataatgtggattcgagagtgtcatgtctgatgtccgccttaggcttatcttttgaatgctgtttcctgttaccttcccagaaaggggtgtggaaaagtgattgaagcttgaaaatactgaagccattagtagaagttccatctcctgaaagtggtgattctgaaattatataaggcaaaattaacaattatgcttaattactttcactcatgtgttcattaaaatcaagtgctgtcagcccattcgttattacggagtcgtaaccttgatatggtcatttccttctattttgcctaaatttcctttccttgtgccaaaataagcagaacacatgctcacctataaaatgcaaaatcttgcgatatttttaaaagaaaagactacattgccttaatagatcctttcttgagatttcattttactttgtagataatgtatctttttgctactttgctataaattttaaacaaggaaaagtatcaaaatcagcacatggctagtgtgtatgggcccaggtcctataaataactatgccagctagtcctaatgtggaaaaatggaaaaccagatcctgttaacaaaaggaaaattccatttttcatacatggtactgctcttattcctcgcccagtgaaaaacaagcactttccttttctccgtgtgtattacattaatgtgttggcaatacaggtgtttcaatctttatagtaaaggcaacaaatctatcaccatactcacttcacataaaagcttggtctctgcagaagcaaatttgtaccatcttctatcttctctcttacattcccccctgactccccctctttcctaaactgcttgatactgaaatggaggtcttgcctagaggtctccaactcaggccacaaatgggcagaacccattatttagataggacttagccaatgagcaccaccagactagtagaaaaatcaggaggaaacatgaacgagagaaggtagtgaaagggaacctgattttaactagctctgtctttgggggaggtatctttggacagctccctctacatttgatgtattccttttgtcacactctatggaataatttcctttaatagagcaggactccttaagacaaaggaaagttaaagaattactcccgtaggcaggaaagaactttggccaccactatattttctccaaaattttattatgaaaattatcaatcatataataatgctgaaagaattttacagcagacacctatatacccaccatgtagttttaccattgatatttattctacttgatcatgtatctatctatctaagccttatccatcattaatccacttgtttttatgcatttcaaaataaattgcagatctcagtatatatccccctgaatacttcaccctgtgtcttattaagtagagttccatttttgtttacagtttttttatttgatataaagtgtacatagagtgaaacacacagatcttaaatgtacatttgtggtatacttcaaatgcatatgcctgtgtgaactgaaggcctaacaagatttagaaaattatcatcatcccagaaagtttcttcatactccttcccagacatcctgcctgtccttgaagcagcaactgttttgagtctttcctatcatggatttgctttgcctgttatagaatgtaacataaaagaactcatatggtatgttctctggtgtgtagggcttttttcactcaggataatgtttttgagattcatctaacattcagtattttgttcctttttattgtgtagtagcaaattgtatgccatagtttattatccagtttgccatcaacggatatctgagctgtttccagtttggctattatgataaagctgctgtgaatgttaccataatgtattttgtaaacataagttttcattttctttgagtgaattcctagaagtggcctttttcagtgacaggaaaggtgaatgcttagttttataagaaactgcctgcagccaacagacacatgaaaaaaagctcatcatcactggtcatcagagaaatgcaaatcaaaactataatgagataccatctcatgccggttagaatggcgatcattaagaagtcaggaaacaacagatgctggagaggatgtggagaagtaggaacgcttttacactgttggtgggagtgtaaattagttcaaccattgtggaagacagtgtggtgattcctcaaggatctagaactagaaataccatttgactcagcaatcctattactgggtatatacccaaaggattataaatcatgctactataaagacacatgcacacgtatgtttattgcggcaccattcacaatagcaaagacttggaaccaacccaaatgtccatcaatgatagaatggattaagaaaatgtggcacatatacaccatggaatactatgcagccataaaaaaggacgagttcatgtcctttgcatggacatggatgatgctggaaaccatcattctgagcaaactatcacaaggacagaaaaccaaacactgcatgttctcactcataggtggggagtgaacaatgaaaacacttggacacagggtggggaacatcacacactggtgcctgtcagagtctggggggctgggagagggatagtattaggaaaaatacctaacataaatgacgagttaatgggtgcagcaaaccaacatggcatatctatacctatgtatcaaacctacatgttatgcacatgtaccctagaatttaaagtattaaaaaagaaaagaaaagaaaagaaaaggaaagaaaagaaaagaaactgctgttttccaaagaggttgcaccattttacattcctgccaaccacaaacagatgaaagtttcaggtgccccacatcctcagcaacatttggtgttgtcattctttttaactctggctgttctattgcatatggccaccattatatatttatatatgtctgtttaaacctaacctcaatgctattgatgcttagaatttctagctgttctctgtcaccttggagaaacaatggctcattagctttgggcaagttcatctctttcttgctgtttggtactgaggtgatggacatagagtataaaataaaaatacataaatagcaaagcatggtaatattaacaaattgcgcaacagaagcctaataacattattggctactatcgtatagagagtgtattatgcaccatgtatgctgctaagccctttatacaagtttttgtcatttatttttttcaacaatcgtatggaatagtggatagtaagtataccatcccaaattacaaatgaagaaactgaaactcgaatgttaaaaaaaaaaaaaaagcccatggtcacactgctaccagaggtttgcctgatccacagagagaagggattgaagagggcaactaaatgtatttaacttaagtaataaataagatgtgtatattttctgccaactggtaaagatgttcataatttcagtgaccctcaaaagggaaagtggaggaaagaaagtgtttttcttcagcattacctgcagtattcacacaacactgagttaattcattaaaagacctctgcataaccccttaatgggtaattcagctttcatagagttcattgtcttttactttcttttgtttgcttcacagatggagtactttataatgcctatgaaaaattttccatctggattagatcaacttcaaatggaagacaaagagagaggtaaatgctcctgtgtttccacggggatcgtcaggataggaagacttttccaaaaacaacacaagcttggtctcataaattgggcaacagggagagctagtgcaatgaataataatcacttatggactttttctttggtagcttcagactgggtcttccccagatagtatgaggcctttgtaagatggctgtggtgacagccaatgagctgtcagctggatattccttcactggagttcttactttcatctgctcatattccatatttatcttaatgtcattcttctctatgtgattattgcagagatactgcattttaatgacattttaacctaacttcattcatttaatgctcacaatggctcttcaatggggaataagaaggaaaactgagatgcagaaagttcattcattcacttattcaacatttaaagatccccacagagctgaaaaggacagtctttttctttaaaaagcttatgattatggatagagacagatatattaatagatgattaccttcaaatgtgaaaagtgctacacgagatttaagtaaagagtgttagggaagcagaggcaaatggatgactaaggttgggttatttggtattgataggaaggtaagtctatagataccaggtgggctgattctttgactaatgcttctttcattaacaaaaatagagtttaccctccataattttttaaaaatacacaccttgctctcaaaaatatctaaggagcttacaaaaagttatatataatatgaattatttgtacatgaatttgaacttctttaaagtggatccatgatgctgtgccttcaaacaaacctgaaaggtgtttttcttctctccttttcttacattttttctcatcagcctgcacacaaggatggctaggcccaccccatgatgccaaggtgcatgggaaagtttccaaggaaaagagttatggctgccccattacccatgttatcccttcctccaatagctaacatgcaaacaagtgtggaagtccccataggccaaaagagatgtgtcccactgcccctcagctgtgtctaatcctgatccacatatcccctcccctcaattccaagattcttcatttttcaaatgttgtcattagacagtctttactttatttctaatgtctttccagggcaggcctgaagggtgaacaagattgggggagaggtgatgaagagccatttattttaccagtaggaccccagggactatttcatgtgtattcattttcataatccttcatggaaatggctttagttacttggcattttcctttaaaagttagtagcaatctactttctattgcttgggataggctattcaagtaaggagacagaaaaggaggaggaggaggaaaatggggagaaggagaaggaggaagaaagaccaacacagacactctgaaaaaaagaaaagaagagtagggattcaatgtagtaaaatctcatgacagttttggatgagatttggacatagtactttatctgttgaactaaattaagccaaatgagaacaagctgttactgagctttgaactaaaatgttcaatttttgctatccttcacctctttccttagaagatgaatgtgttaaaaatagctcctctttccttaaaggaggtacctgttttattttccaatctaatcttccatccatcttcacttcctatctgtcttagagctttgagaaatgtcttgctgcctagaaaagcccattccctcaacttgccatcagtttcccattccattcatttaggcttcagtcacttgcattatgggaagctattgtagcttaactatcgtatcagacaaactccaattccagtcataaactatatgctggattcactctttacattcatggaaaatcatttaaaaaatggtgtttggaacattctgctggcacttcaagctccatttctggtatgtttcaacaaaaaatatatttgtggattctttttctcttacacctcccttttccctcccgccttaaaaaagttggagattttgtaagttaaattaatgcttgatgtaatttcctgtaatagaaggcacaggctccagcactaactatcctttcatggaaaaacagctcattgcccctggatgtggagtcacaccgttgaattatgagtctggatcattgctgagtggatcactttggagccagaaatcagagtggtagcaggagaaaagagttggcaactggaggggagggaaagggtttgttgggaatgagtgccaggacaatgtttaaggacaacagaaatgcagtggagaaaagggaaggacacttaagttacctagaaataactaagaagccaggagagatccagactgtactgggttagagcctgccatgcagcaatttaatttccaatattatcgataagtggaaaatttctgggttgtaatgcttttgaaaagataatgcaagccatggtctttgggatgtcaggaggacaaataagcagatgaggcaaaggaattctgtatgtgagatgagttaaaagcaatctgtatccatttgtaggtctgtgcttatatgtctttccaaacgcatctctaatctcttaggtctggaaattaagtctacatgccaaactttcctgtgttggtttacctgtctatcctgatttaggtgaggctagattgctgtgcaaacagaacttatcttgtggtgaatgattatggtttgcactgtttcccgactcagcctaaatgcaagtacagaggcattcagtgaagttactgtggttagctctcctaaactttcagagacttcaggtttaagtggggccgatatttgaataaagggtcaaataggtggtacaggcctcttttgaaataatcttaaactaaattttacagtttaaggtaagatatgatcatatggagtgcttattgtgtccttgttacccaaagagcagcaagaaataaattagaccacacagggaggtatgtgtaggttaagaagggcacagataaatttgggacagaagtgaatctttaatccatgttatttaacttaacactcttttctaaagattatttgcttcctgaagacataggtgctataccaaaaaaaaaaaaaaaaaaaaaaaaaaaaaagaagaaaaagatagttgtggtagaataaacaatgactttacctttaggggaaagagaaatttaggtttctgaaacactaaaggagacataaacattgggagaataatgaattcctgtgcagctcacccaacaactgagctgtagtgttacccatatgcggcagttccatccatccacactacagcaaggtttctcagccctggcactattgtcactttggactggatacttctttgttgtggggtgccattctgatgttggcagaatctctggcttctatctactagtgaccagtagcacctcctacctaaaaaatggcaatgaaaaatgtcttcaggtattgctcaacatcccctcaggggcaaaaggatcgctggttaagaaccactgtactggccgggcgtagtggctcatgcctgtaatcccagcactttgagaggctgaggcgggtggatcacgaggtcaggcgttcaagaccagcctggccaacatagtgaaaccccatctatagtgaaaatacgaaaaattagccaggcgtggtggcgggcacctgtaatcctagctactcaggaggctgaggcaggagaatcacttcaacctgggaggctgaagttgcagtgagccgagattgtgccactgcactccagccgggacaacagtgcgagactccatccaaaaacaaaaaaacaaaacaaaacaaaacaaaaaaccccactgtactagagcaatcataaggactagtctagatactaaataattagacctttatttaatagtatcttaagaaaaatgtaatgacagacaaaatggtgttgttgaaaaggcagggtcaggcaagtgtggattccaagattattttctctaagtcacagagtttgtcaaatgaggggctctggagattgtggatggaatgtgagagactggaggaggagagaaaagggaaaacaacaaatgttcagtataaagaaatggatactcttattaagaaaaattccatttttgtgttttcctaaggacactttgtgtgtgtgtgtgagtgtgcgtgcacacgtgtgtgcacgtgtgtgtgtgatgtatctgtggcttatccgagcttctagaatgtaatatcatccatagagtaaatcacttacgtctcttaatttattggaattatgagttgattacctaccacataccatgcaccgtgataggcactggggattcgatggtgagaaaacagatttggtccttgccttcctaataatcttcctgttgggcaattggtattgttgagcagacaactatgactgggtaaatctgcgagtgtataaacctggagcaccacatacaggttttgagaaaagcaatcttccaaggcctagagtgtccacgtacattctttttgagtatgccaagaatgcaaggccctgaccaatctttatcaggaccacttttcaaggttatgtctgcagcaagcaaccttcaaggatgaggcaatgtgtacctctggaacaaagagcaggcttgcttactgcttgctataaaacagcaggttcccaagccagtatttctctgttgtacaacaacctatatgtgcacagcattcacccgagcctcttcttgttgtccccagaagacttgggttggggagggcgggggggcaaaggaaactgacactcatgctgcttgctatgctgtgattaataaagtcctttgtttctgacccaggaatctctagtcttcttctaacatccatgaacccaaaacaggcaaccttatcttgtaagcagagtaaaatcagatgccagatcctgacagtgggatccagtaaatggggctttaaaacaagggcaaggaaaggagattttcagagtgactatgaggacagacttcagtgcttcatctgagtactagagagcagctagttccaagtgaagcaggagaacttggctccaggagtgatctcattaaggaaaaatgaaaaggagaagttccttgatatgcttacacataaagaaaggggacttacacatctggtggagacttggagtattaagtatttatagattttacaagttctcagttaataaaaaaaatgattcaggcctctagcacaggccccattaaagatgttaccttctcacgtaagctttggtgtcagatgacttccacatagctactatgagttgagagagagaaatggaggtgaggaaataaagaagtcaagattgagaactgcatctaggaaaaaagttcggtagactattagactatgaaatgactggcagcaaatagaccaatagtctaatgattttttttttttttttgagacagagttttgctgttttgcccaggctggagtgaagtggtgcaatcctggctcactgcaacctccgccccccaagttcaagcgattctcctccctcagcctcccgagtagctgggattataggcgccaccaccatgcctggttaatttttgtatttttagtagagatggggttttgccatattggacaggctggtcttgaactcctgacctcaggtgatctgcccacctcagcctcccaacgtgctgggattacaggcatgagccaccatgcccagcctgggaagtctaatgaatattttgagggaagtgtattgtcaaagacaccataaacttaacctcaaaagccttttgactgctctgtaagtcttgaagcaaacccctagcagaaagtgtactgttagaatccacccagttctcggggaaggcaggcacctcaaaacccacttcaatggaaaataacatacaaggaaaaatttcccagagggaagattcaggagccatggaagacagtggataggaaacttctttcccagaactgaatctgagtctaagcaaggaatttgccaatacccaggagttgaaatcctgctcacaggattccatcattgctatgtgaccatgactgcttctgttcttcagttttcctgctctcccgttgcctattgagtgtgtgcatatgctttgggggagcggggacagcaaattacttgtctgtttagtttgtaggttcttgggcttgaagagttgtatctaaaccttagagagaggactgtgtattacctgtggatctcaattttgatggagaagcagtaactctggggcttggggttatagccctagtggaagaactgattatggtaggcctgtgggaggaagagtaaaacacatatatgctgactggaatgacagagacagcactatgtttatccaagtttttcttttcttttcttttctttttttttttgagacggagtcttgctctgtcccccaggctggagtgcagtggtgtgatctcggctcactgcaagctccgcctcccgggttcacgccattctcctgcctcagcctcccgagtagctgggactacaggcacccgccaccacacctggctaattttttgtatttttagtagagacggggtttcaccatgttagccaggatggtctcgatctcctgacctcgtgatccgcctgcctcggcctcccaaagtgctgggattacaggcatgagccaccgcgcccggccccaaatttttctatccactaacatagatgctatttctaatcttccttgcagctaggttgtgccgcatgccttgaattctgaccaggggtctatgaatggaaggtacacacaccacttccaacctatctcattaaaacatcaccctggcctctctgcagatattgaggatccaacaggggactccaaggccctgggggtagagaagcatcaaggtgggaggttcttggggcccgaatcaccccataaagggtctcccaccaagtgaaaacatctgtattggatctcctatgtgtaagaagtaaacatttactgtgttaagccaatgagatttggaggtgtctttgtgacaacaactagtaaacttactaaacatagagggggaaagtacaaaaattactaatatcagggaaaacaaaaaattttacaagaaaaaattgtaatcttagtatactatacaaaatagatgtgaataaagcaagtacaaatgattgattcagccaaaatttctgctataatttatggagaggatgagggaaaaaggaaagagagaagacagagagatgaagagaaagtctgttttgcaggaacagaaaatataacagatttaaatacttatcttcctaagttggaaatcaaaagatatatcaaaaatgaaaaaacccagaaatagcatgctatttagaaatatggagataaataccagagcaaacaccttaaagagtgggaagaggaaatcaagggtggaatcagaggctgtgattttttttcattataagctttgtagaactatttgttaaagctctgcatgacataactttgataacaatcaaaatgaaataaaagaaaacaaagtgaaacctgacaaacgacttcaaagtaaaagccattgaaattggagaaaagcagtgggctgcagtcccctaaaaaccaagaagagagtatatttggagaagcagatggttatgggaatgaaatgttattgagatgttaaccaagatgaaaactgaaaagtgctcattgaattgagtgacagtcattggtgacctcagtgagggaagctttagtggagtagcaggggtgggagcaaggaggtgagaaaatgaaggagtatatttgaaactgctttggaaagagctgcactttatgtatataatgtaatttagattattgattttctaagactcatgagccgtttctgcatatgaacctcacactgatgtgtaaaaagggaaaagaagataaatgagcttgcttaacattacatgaatcttctaccatacttctggaacacaggctcaaaggggcttgtgcagtcctgaatgcttaaccaagaaccttgagagcaaaaccacctggaaatctgggtttgaatggtcacaagacttcagggatgaagcttcactgggtattcccatctagtgattatttctttcattttctactcaagtgaagggaagatggagccacttagaatgcatcatccttaacaaataaaatatgattagataccaaaacatatcatccaccttcacagtaattagtctttatgcgtattagctctgattgcttttcatagtaaaaaagattttctaatcactttctaaattttacacacacatcagaagaacagaaactcaggggaatccctgcttaacatggaaaaaaagaaaattaaaaattcaaaagtaagaagaaggtttgcatatactcacaagggagaaaatagaacataagctatctcattattattataaaatatgttgcatttctgtgggtttataactcataattaagggctacacttttttttcatataaaatagctctacttcccattctcaagaacagaaaaggtacaaaggacttttttttctttttttttttaaattgacaaagtctcagtgtgttgtccagactggtcctgaactggcttcaagtgatcctcctgcctctgcttcccaaagtgctgggattataagtgtgagccatcatgcccagccagtacaaagaatttttaaaaagaaaggagaatgcaagtttcagttagcaagaacaggaacataatctctggtttaaaaggtagactctcaagaagagagagccttatgcaaatgagtttgcagaagaaaggctattttggaaacataactggcatctgaatgtctgtctctccaggtggcctgttcccttgacataaatctacttgctttgagtaacttgtcttttcatagatagcctgagaattactttctttggaaaaagccctacattagatattcccctgggataagttctccataaaatttagtgcaatctgattgagcacgcactatgtgttaggaacggtaaaaggcacctgacatacttacttctattgaattagcccaacaacctaatgagataggtgccaccagcctcatttttcagagttcacattactttaccaaggtcaaagtatttgtaagtggtagaatcaggattcaaaccaggccccgcagctcttaagttgggacttggaaacttcgtgggacagagtgtccttactcctgggctatcccatttggtgtgtctctaatccccattagaagcagcagctactaacaactaaactcatctgttttccttttctccattcgactccactccactcaaacatatttctatataccttaaaacactttcttttataaaaagtttaatatcaggatatcccttcagccactgcctcattggaggtcccatgtgatcttccataaatgtgatctctcctgtgtgtgtgtgtgtgtgtgtgtgagagagagagagagagagaaagagagagagagagaggcagagacagacagagagagaaagagagagagaatatctacagatgtaggaggtgtagtagatttagacacacacatattcatatacagagaacttgtgatgtccagctcttgcctgcttaacattgtctttatacatatgctgtagattagcagttcccaacctttttggtgtcagggaccggtttcctggaagacaggttttccacagccattgggttgggggaggtggaaggggctggcttgggatgaaactgttccacctcagatcatcaggcattagattctgatgaggaatgctcagcctagatccctcacatgctcagttcacaataaggttcgcactactatgagaatctaatgccgctggccaatcggaaaggaggtggagcttaggaggtaatgctgatcacctcctgctgtgccgtccagttccaacaggccactgaccagtactggtccatgggccaggggttggggacccctgctatagattaccagccccctcaagtccctgagctaatgagaagagcctcttattcttctccccagagctctctctggttggcacactccctgtacaccatcttgccttctgctcaccttttcctcctctgtgctctacctctagacacaatgcactcaagacctggcatgtctgctaccttgctcagcaccttgcagagaatctgtccatgcaactcttgcctttctgccccagagtttgggagggagcctgaagctaaggaggaaataccggagtgctctccggagcaaataagaatcattttttggtctcatctctctctctctctttttttttttttttttggagacagggtctcgttctgtcgcccaggctggaatgcagtggtgtcattgttcactgcagccccgactccccaggctcaagcgatcctcctgcctcagcctcccaagtagttgggattacaggcatgcgccaccacaccaggctaatgtttgtattttttgtagagaccgggtttcatcatgttgtccgggttggtcttgaactcctgagctcaggcaatctgcctgccttgccctcttaaggtgctgggattataagcatgagacaccacatctggtttcatctcattctttaatttcagcagtactgaagctcagtcttgaaccctagtcagctttgctggggctccacccatcaacataatcttatgaggcctctttctctcacattgtgaatttaattccagtatcctccatgccacctactgggtcctgctttatctttgatggatccttcttgagctaatgtgctgtagtccaagtgcttttgatttttccactatcctaaaatttgcccctaccactagatgaacatcttggatagcaaagcaaatttgatattaacattagtagttaatgtttaatgagcttctgttctaagcattttacatctattatcttaaagtccatacaaccttatgtggtaggctctattactatcccaattatttcatattttaataattataattaccctaatattttatattaatttatttaatcatttgacaaatatttgttgaacacctactgtttgaggcattggggagacagcagtgaacaaaccatataaagttcctactctcatggagattaccatatagtaatgggatatagacagttaacaaataaacatgtatatatcatatggagtgccaggaagtacaaagagaggagatggagcctgctgggggaacaggtgatgtcttatttaggagagttggggaaccctccctctctaataaggtgacatctgagcagaactttgaaggaagtgagttaggattgtaaatatttaaagagggttcaaggcagagggaagggcttccttggtttgttccaggaatagcaagatggcagtgtggctggagtagaacgagtccaagggataaagggaggagttgaggttacagaagtaggaggggtcatctggtagggtcttgtaggtcacggtgaggatttggggtttgactctgagtgagatgataagtcattgggaagaaaaaaagaaagtcaatggggctgttggagtaggagccttaggattagaaagaacacgctagatgttctgaggagtagggactgttaggggacaagggtaggaaaggagggaccatatgggaggttactgtaatagtccaggtaagagagggtggggactagggtggtggacataggagtgtttggaagtggtcagatgggagatgtatttgtaaggctgatccaataggatttagctggcatcatggatgtgggatgtggctcatgcctgtaatcctagcactttgggaggccaaggcagtcggattgcctgaggtcaggagtctgagcagcctgggcaacatggtgaaaccccgtttctactaaaatacgaaaaattagccaggcatggcggtgtgcacctgtaatcccagctactcaggaggctgagagaggagaatcacttgaacccaggaggtgcaggttgcagtgagccgagatctcgccactgcactccagcctgggtgacagagcgagactccatctcaaaaaaaaaaaaaaaaagaaagatgcatcaagaatgactccaagaggcttttggtggaaggaaatttccttttactgagttgtgggagactgggtgaagaccaaatttaggtaggggttgggaggaattggaaataaagagtttaatttggggcatgttaactttgacatgtaggtggaattgctgagtaggcagctggatatatgagtctggaaccaagacacagagtttacataacttacctaaggtcacacagctagtagtaggagggtgagatatgaacctaggccatctagtcattgtggtcttgctcttaactattaaccacatcctgcatcagaaccctccaccttcctttatgaaatgtttttgtgttgttggggacacttcttatgggtcagccctgtattttaccccattcctgcagtccatgtggtctcagttttcctgcttctcattgtgggtttactgttgagatcagtttaccttctaaaaatgagtaggatgctctaataatggctatatgctggaaagaaaaaattgttacagaaaaatgaaaatatctcttcttctactcttagaccctggctcaatttggcagatctgcaataagtacaatgaagaaacaaaggaatctcttaggaagtcactgactgacattgacaccttccttctgcattgccttaaaattctgtgtaattgtatttcttcaatcctgttttatttgggctgaaatatgtagtacagaagacaatagtattcataagaaatattaagaacagtgatcatgctgtttggggagataaccttagtgcttacttttatgccatatatccactgtgataaaaatactgtgaatagtgctgttactagcatataactatttatacagaagatatttaataaacgagtgactctttcttatgctttcctataacagtgcttaaaactcaattttcctggagctattttatcaaagaacagaacactagagtgggcagagactttagagttcttccagcccaggacctacatacatattgtagatgagaaaactgaggacagttggtggccaggctgggagaagagcccagactccctaagccatagccccactatgctgaggggaatatagactgtcttttgattattagctgggcctgctgctggccaggctttgtttcatgaattcctctgtctattccttcacgaggcttaatggcacttctggatgttcttaccacctccacgctgctgaaaccttgccacattcccaagctgtggcttgttttgcagctgtttcaaatggggatgccatactgagaagtaatacctctgagctgccttgtgctttttctctgacccgatcatgtggacatcccccctgggtgtcccaatctgtgtagtttcaacgacctgctctcccaatccatccagctcattatgtcctaagcattcagaggctcagcttcgtttcagtccatcaagagtttatgttctatgagagagtttgagatcaacttcatccctattacgctcactgtgaaaaagtgccagtggaaataaaagagctcatacatctaaatgatttaaattaaagtaaaataaaattttccgttcttttgaattaggccattaaaactatagcttagtctaagtacagtattaatgagcaatatcgcaggagagtattaattttgcatttcttgacataaaaatttaaaacatgcaattttagctttgctttaagtaatattttgtattcccttgacttttatttggaaaccccagaaatcagggtaaaaatgggatagttcaaaatcagatgcactgaactcatatgtaagtacatgctaccctctcatctccatgttatattgcagacttaaaccagatataggatcatgtggcatttcataccatcaaagcactagtggtaaaggtttatgtgaaatagacctttagacctgttggtttaatatattctgcatttctacctttaataaaaggatgttctaataaagataggcaagggtataaagattgggacccctagtggttagatggatagcttatttgcagcccaatgctaatggggtagcgatgttgaggcaatatgccatccatgcagctggggccgctcttcttgtcttaagtcatgtgtaagcttcaggatctaggctctgcagaagtcggagaatccctgagactgtgggaagactgtaggttactcattggtgcaggcgctttcagaagtctcatagttttcctttggctttagacactacaaatcgcatcaaatcagaggtgtagaattatacgctagagggcttttcagccaccagagcaaccctgtccagcaattgctatcttggaacaatggccatgtccttaatcaggcaatccaattagccacacacaaattatgaagtcgatgtacctaaagcaatttgtctgcaaaaaatttaaaacctcccttaagaatttgcaatcaaggaaaacccttttctccttcattttttttaattgaaagttggacacaggacagaataaggaaaacatttccaacgttgagtgttgcctaagagactctaaagtatcagccaaaattttgtttgagtaagttgtgagtgagagaggaacacagagggtaagattggtggtttaattgcatcatgttccttaacaagagatggcaaatattgtatttgataaaaaagacgatgtcttatttccattgttatctagtcatgcaatgaaagattgcttgtcatagcctgcagcactgtcagtcaccctcattttcctgatctttgcagcactcagcttctctgagagtaaaagaataactaggaagaagcctgcatggcagagcatttgtgctttcttagttttccatttagtccatgcacaataaccatttgtgtattgttcttgaccaggcacaaatcaccttgtatttaaagatgtctaagaattctcaggccggccatggtggctcatgcctgtaatcccaacactttgggaggctgaggcgggcggatcacgaggtcaggagtttgagaccagcctggccaacatggtgaaacctcgtctctactaaaaatataaaaattagctgggaatagtggtgcacgtctttaatcctagctactgaggaggctgaggcaggagaattgcttgaacccaggagacagaggttgcagtgagcagagatcgcaccactgcactccagcctgggcaacaaaagcgagactctgtctcgaaaaaaagaattatcttgtactccaactctttaataaaaaggaaatctgctgcctgtcttacagggttttcttgctagatatagttttagagatggaagagagtacctaaagtcaaatccaaacttcatttcacacatgaagattctgtggctcaggaggtaaaatgatgtgattaagattatacacccggtcattagaagactagggattaagtttcagggtgcctgactccatggcctgtgctttaatactgctgtgaaccaaactggacaggaaaattggtcagggatgagggcacaacttccaggagcctgtatttatagtcacctgtgcatagaaatgaaaacatttctatttatgtcttccttatgctgagcattcatagatcctcaacaacaaaacccttatgagaactttggaatttattttatagtcagataaagcatataaatatgagattttttataggttagacccagattaatcaagtccagcattctctgtctctgtggaatacaccacaaatcaccacagctcctcttaatcatttatgaatctcttatacatagattttttgaaattaactttactcttgctatataaagtataactgtcttttgctgtacctaaatatgccccttgcaaattcagtctgtgtctcctagtaccctagaatttaaggcacatatcagttttcaacttatccactaccacatttacagattgaaggtcctaatatttaagtctttatgcagtggcctctcattgccaaatcggcgtgactgtcctattctgagctatttctagctccacttttcaaaggctggggaaagtaaaaccaagtgaaatgatggcttttccaagttctgctgaaagtcactggcaaagccaagagcgaaggcttctgattctcaattaatttccaactcctagtcacaaatgtcctattgtaaaaaatgtcctttttgtttgcttggcaatttgctagtaaaggaatccaagacaaaaatccaaatgtcaataacctcagtattcaatggcagaggtacaacttctgatgtgaatggaaattcattttgggatatggtggtagactatcaaagcatgattgaaaggggaatgtttttactgatgttgaaagccagtgcgctcacttaatgattgagcaggaaaattcaagaagagagtgaagacatcagatcactatttttctattgttcagggtagtgtctttggtatgcagtcgttgaaagccctccattttatgtgaggaaatattttttttatttccctcaatgtcttaatattgctgctgcttctctccgggttgaggaggctgtatattctaccaaatgaaatgttgagtggagatgagaaaggaaaaattaaaaaaattaaaaaaagcagtgttgttgctgacagggatattttaaaaatcaacacagtttcatatgtatttattaagtgcctactatgtgccagttaccaagcttggctctggggaaatagaatgagtaaaacgcagatgccacctatgttaggtaggatatttggtcacaagtggtcaaaaaccaacataaactggcttgagcaaaaactcagttaagtggttcacataacgtaaaaattcaggccattgcttgaccagagttcaaacaatgtcaccaggtctcaacttgtcttttccgtctcttagctctgtcttctaacatgtccactctattttaaaggaaggattgtgtgttgcaagatgtcttcattgatccagcacatcccacagggaaggcgcagaatttcatggtaccttatcagcaaacaccgggtcacattcccatactgggggatgaaatgctttgatttatttttttctagctccatccaaactctatgggccctacaggaggaagttgttcttcagaagaaaattaggataccattaccatgggatgaaaggatgttgaacaaccaatttctgttctactttccttgaagagcatatgttctagtggagatcagttagttatcatttccactgccctcctcctgggaaactgtgaagcatacaggagagcaaaaaggcttatggtagccaggcatggtggctcacacctgtaatccctgcaccttgggaggctgaggcaggcagatcacctgaggtcaggagtttgagactagcctgaccaacatggagaaaccctgtctctactaaaaatacaaaattagctgggcgtggttgtggctgcctgtaatcccagctacttgggagcctgaggcaggagaatcgcttgaacctgggaggtggatgttgcggtgagctgagatagtaccactgcattccagcctgggcaataaaagtgaaactctgtctcaaaaaaaagaaaaaaagggttatggttattaacaatttagaaagatccatcagcagattgtcatctgctgactggagactcccccaaagtggacacacacacaagattgtgacgatcttatatttgttttaatcatcccaccaaaattagcattgtgtccattgagtaatcattgctttgtccctatgtatacaaacatttcttttcctgccatctttcacctccctgacttctcatttcttcaaaaatattcacattttatactttcctctgaacttctgcctctccttcccattcaggttttagtcatattgcatacctaaattttgcagagcagaattttcaacaaattagagtgcattgtttgttcccttgttttaattcttgggaacattttgggagacaggctacacaaaagacctgatgtgcctcaaagctgtaatatattatcaggtttgaaatgctaataagagtctatggaaagaacagttagtttaaaagaaatagtgagcttaagtagaaaaaaaagcaaattttgaagagatgtgaaaggtattcccaaaaaaagggttacagtttaataatactgggacagtccattatggaaaagaaagaagtatttaagattcagctggggaggctatagactcaatgttatttccaataataaaaaaccccatagggttgttaaactagccttgtagaagagtgtcagtggcctggagaacaatagcaagcacagatgtgtgaaatgcatacacagctcaccacagcaaggcatccaaagtgggtcacggcactggaaccattattgaacatgttagggggtagattggaactcattttggggttaacataaactttttttttgaccatcttactactgtggggtgccttatagaccttggcagcaagttttaatgtgtggctcattagaagaaatggaatgttgggatttactggataatacttgagagaaatctctcctggggaaactttgtgctttgcccagaaagacagttctttgataagaataaaaataataacttgttccagcaccttcctccaggacaataatattatcttgatttaagtcatgcctttttctttgtaggagctcaaactgagttttatgtggaacattatttctgtttatcatcacaaattccctttgaggaaagtaaggggtaggtattactattcctattttaaagttggggaaacagaagctcagagaaggacaaataaatcccactgctttaatatgcaggtgatagcttagtgcaagtccaaatatctgtcattaatctaaagaagctaaaccagctccccaaagctatatgataattctttttctttctctctctctctttttttttttttttttagagacagggtcttcctctgtcacccagactggaatgcagtggcatgatcctagctcactgcagcctcgaattcctgagctcaaaagatcctcccgcatcaacttcccaaagttctgggattacaggtgtgaaccaccacagctgacctgtataatcattcttaagagattgcgctctagttcataggaggctcgagaaccatctcctgctttgaaggccatgcaagagaaatctgagctatctttcagtgttggatatgatgagttcgtgtctagtttcccagctgcgcatctgcggttttggtctgatttgcaggttggttccttctttttacccaagtgggagtatgtgccccagtttggactttaccttagaactccaaactcttagctctctgatttttcatttttaaaattaaggaataggggggttacctcctatttgctcccactcccttctctcaactctcagggagccttgttgccctactctgtgatgcacccactgaagatttaccagccccaggtgtgagtcaaattgaaaaccattctcccagaactaggcccacaccctgtatggcctgacagtcttagcagaatcccctgcggaccaagcacacaactgatgattgctattaggtcctaaagacacaaccaacagagtccaatgcatcagcagttctcaatcttggttgctcttgagaatcacctgtggagcttaagaaatatattgaggcctaggccctgttctccagtaattgtaatttaactggtctgaggtaaggctaaggccttagtagttttataaatgctctctagggttgagagccatggacctaagtcctgaatgtgatagtctgtatctgtgccatcacgaacagtccgtcatcttttgtaagtgcaagggaacataatgaaatatagagcattgtggagctggtcctatgcaatgcactccacatagattcttttattgattctcatgataaccctgtgggatggttacttttatgatcttcatctttcagatgaggaaaccgaagcatagagaggttgagcaaattgcctaagatcacacctctagaagtgaccaaaagtgactctttggctccaaaactgaggtatgtcagcgcttacactacaaagtatttgcagccacgtaagctctgtgtctctaagttacaacttgtgttgcttctggtattctcaattcgatagttgtaatctctccaagtccaggcagaaacagcaagaagacactaaggcaaggaaaacacttagggaaaaatatttttttatctgcattatggaagccaagctatacatgcctccagcctatctctaaagaggaacagagagaacacaactcactgacactgtaagtcctcttctccagtgcagcctttcacagtccactcccagtttcaggtccttccccaaccataactcacatggtgagaaatgggaaccttcataggaacaaattcaatctccaagactgcataggatattagtttctgagttttaatgtttctgtggcatgcagtacctactcagagcatcaaaaagtgtaaaggtggaccctggctttcactagcaccctgaccccaaggatatctttattgtcccatttgacggataggcaagtgcaagatgacagtgggctaggtcattgcctgataaagaacaagtaaggggaagaattcttaacccaagagctttgaatccatcttcctgctaaactgttccctagtcaatgtcagatgagtgtatgctgggaagtccagggatggggaaaccttaagatcatctctgtaaggtacctccaccaacatttgcgtatgatacttagttgaattggaagtcaggcttccaggaaaaagtgtagcctgacactaagagttgaaagagagggagagggaggggatggccagggcactagggcagtttatggactaattatatttaaataaatattttaattttaattttttaaacgtagcatggcctctttcttctcctgaaatactgaccaatactttcccctgtctcccactcctaatagttttccccactcctagccccaatgccaaaatttaggatcccaggacatccccattttctacagcagaagagcagctttgtaactaagtaatgctaactcagtaggctcaaaatacttgtaatcagaaatggacaggccttactgtcaaggttagggcaatcaagtgtcctgatttgccccattctgtcagttttacgatggaaaatcttgctcccgggcaacatttctgttcagggaaaactgggaggggttgttgtcaccctgtaatatcaagctccctaattttatggtgagactccatagcaggagagaatacttgctgcagtttattcataaatatttgcagcttccttttctagttgttatacaaatgttcattgaaacttgctctgatcccagaggggctctgggggtcgggcccttctggcacatctatgaattaggtgaggagagaatgattttctacagccagttttgagtcagggctaattttcaaaatagcccattctcctgcctcctgagacatttatgtagccgtctggttttcatgaatgcatttgtgttacccaagagtgtaaacagccgttagttctcagtgaacatgagttgtgaaaaaccttgcattgagactgcaggagactgtgctgctattccaactcttcctaatgtaatgcggaaattattgttgatatttagtgacaaggtctttcccggggaagaataaagatcagaaatcccactttcctcctcagcatcttgctttcctttccttccaaaatatgtagttccacaaaggtaatttttaaaaatctctcttctgaggcaaaatggcattattatatttaagagtcaaaatgtaacccattgaaatctgctattttctgctcagagaaaaaaaatatgggttaacctagaatttatatttgcattttaataaaaatttgggtttagccaggcacgggggctcatgcctataatcccagcactttgggaggccaaggcaggcggatcacttgaggtcaggagttcgagaccagtctggccaacatagtgagactcccatctctactaaaacacaaaaattagctggacatggtgatacgcacctgtaatcccagctacgtgtgaggctgaggcaggagaatcgcttgaacccgggaggcggaggttgcagtgagctgagatcacgccactgtactccagcctgggcaacagagtgagactccatctcaaaaaaaaaaaaaaatgggtttataaagatcaatactattaaagataattactgaacatatttcattttaatataaattttttcattcatggctaatttcctctttcttgttttgggggtaaggtgtaatcagcatttaatactcactctttcttatgggactagactaaagcaacatttttaaaaaagaccgttactgtttctacaacttcatcctcgatgttcgagttactcatatttagtgttgctgaatgttaaaaacagatgtaagagcactaaacataaagttaagggtacaggatgcagaggggtggtacagttgagtcatttgaataagagtcattgagcacttactgggtacaatgttctgagcttgggctgctcaagattatagagcttggaaaaatgtgtgttcttccatgtttaccgaatgcaggaatagcaatgatgcaccacctaggcttttgagtgaaagccaattttgttgttgttgttgtgaagtgattttatgtttagaatcttatattttactgttaggcacatttaaaaattaagtcccttaaaatgtttccctactgtgaaaattggctgggactaagatacccagttgaagaacacagcagattcagggcacagagacagtgctggcgtgccacttgattctggctcacctccgattaggcaattagtcccacattatttgaggacccaatttgcttttacattttaaagttgtaaaatgcaaaatgatttttttcacttcttaattatgagtaataaaaatttaagggaatataaagtttaacttgtctgttaattgaggggaaaaagccatgctaaatcagccaagaacagaatggtcactgaagaaactcagaagaaactgcccgtgaggatcccgtttgctattttaattagcatctgtcaattagaagcaaatgacagcagggaaggaatcctgattaataaaatcatcatcccaatttgaaagagaaggtcaaatagaacacaatgtcccatttgacatcgttttgagggtcttatacacctacatttctggaatcctcttttagagctcatgagaccagtctgttaatctgaccactcaattaactctgggtataattaactgcctgcacgcccctgactggtactaaagctcactgtcagcaagattagcatctggctcacgtgaggagggtgacatggtttcctctcttgcatagtgactgagggataggaaggaggggaggttatgagtccctccctgattcccatgtctctagaacacggctgttcctctatgaatttgtccagagcatgcaggggacctatgagaatattaactggtttgtgaacaaatttcacagtgcaataggaccaatttcagcaactagtttggcagcgaaactattctaagtcataaaagaaaggctcctaagcataagtgacatttagtcactgagaagcagccaacctagtttccaacccctcctgtgaaattagtaagcagggcatctgtctacatcttaacaaacaaagtgcagatgccaatcagcgctcagcagggctctgtcaaatgccggctggtaagcagctgcttccaaggccctcctttctccaggctcagcacaaagtagaatctcaatttgctggccaaatttaaattttatcgatccaaacttttgctgttgaagcaatgctctggctagaggacttgatttcaatgacagtcgattatgacaatagcctcagcctgcctctcacacactccctgccagacctccccatcacatacaactttttctttactttctttttttttttttttaaattttactttaagttctgggatacatgtgcagaatgtgcaggtgtgttacataggtatacatgtgccatggtggtttgctgctcccatcaacccatcatctaggttttaagcttcgcatcattaggtatttgtcctaatgctctccctccccttgcccccccaccccccaacaggcccctccctatatccatatgttctcattgttcaactcccacttatgagtgagaacatgaggtgtttgtttttctgttcctacacatacacctttttctaagaaggtcatggggagcaaggaggctcaccagctggaaaataacattaaaacaggaaccatgtggaaatatccagatgagtgatgaacctaagaaatctgttttgaaatgtgaagatagaatttactctagtagtaactgatgggagaaattgacatcatttctgaaaacttcacaaattccaagagctcagttgactcaggaagcctggtggagctaagtctagaagtaagggtatgaaaacctaagaaagaaaactgttcttttctaaaaattttctcataagtatagcaaagtctattagactaattttttaaaaagtggcaaaattcacgtgactggtcctcatcttggttccaagcttgccagccacggaactctgtgctactgctttctaccctgtaaaatagtggtgacactaatagtacctactccataagcttgccaagaggactccatggggcaatacacatgaaccactgagcacagtgcctagctcatagtaagcactctataaatgttagctattacagtatttcaatctgggacacatgaaaccttgtaaggcctgaaacctaaaattcaacgcataaggtgatggttgcacaactctgtgaatatatggaaaaccattgaaagtattcgttctaaatgggtggaattgtatggtatgtgaattatatcttaataaacatgttacaggggaaaaaagcagagaaagagcttttcctatttccttccttccttccttccttcttccctttcttccttgccatctctttctttctctttctttccttccttccttccttccctctttctttcttccttcccttctttctttctttctttctttctttctttctttctttctttctttctttctttctttctttctttccttccttccttccttcctttctttccttccttccttcttccttccttccttccttccttccttctttctttctttttgacagagtttccctgtgtcatcccggctggagtgcagtggtgccatcttggctcactgcaacctcctcttcttgggctcaagtgattctcgtgcctcagcctccagagtagctggaactacaggtgtgcctcaccacacctggttaatttttttgtatctttagtagagattgggttttgccatgttggccaggctggtctggagctcttggcctcaagtgatccacctgcctcagcctccccaaatgctgggattacagccgtgagccaccaggcatggccagtttttcctttttctgataagaattttcttctttgtctgatatgaatgtagtacaatatgaatgacagagttctatttctttacagagcaaatgtagttttcctaaatctgaactttagtgtttccttcaggtgtgagggataccccagattgaaatattttgaacaactagggtttgaatttgtggaaatgaacaaataaagaaagaatggaattgcagaaataaataagagggagagagagaagaagagagagagaatagtctattaatttgtagcttgctatacagcaagggaccatcacttgcattttggtagagactcacaggcagtcaggggaatggaaaagctttacagtgaaaaaaggggctttaggtattgatggaattcaggacatgctaccccaaaatatggcaccttggcatttgagggaacagcagaaggaggtcatggaacgtaggagggccactctcaccttcctttcatccttctcctgtgaagcaagtcataggaccctaattcaagagggatcctccccatacctggaagaaagaaacttccttatctctgaagacacagggacacagagaagaacctgaacaaacaggccttgctaagtcccccgactcaccccctgcagtgtattaccattagaacaaacccctttgtccaatcatgcttctctgtgactattcaactcttcatcaaacctaagcataaaaatacacatttatttgtttctttgggtttttatctctttgtgaagacttttgtgtcatataaaacttatattaaatgaacttgtatggttttctgtctttaatctgtcttttgttaaaagaatttcagccatgaacctagcaatttggaggaaaagatatttatttcccctggggcaggggtcctcaatccctggaccacagataggtggtagtctgtggcctgttaggaattgggccgcacaacaggaagtgagcagcgggcgagcaagagtgagcaaagcttcactgtatttaaagttgctccccatggcttgcattaccacctgagccctgtctactgccagatcagtggcagcattagattctcataggagcgtgaactttattgtgaactgtgcatgtgagggatctaggttgtgcgctccttatgagaatctaatgcctgatgatctgtcactgtctcccatcacccccatatggggcttcccagatagttgcaggaaaagaagctcagagctcccactgattctatattctggtgagttgtataattatttcattctgtattacaacgtaataatattagaaataaagtgcacaataaatgtaatgtgcttaaatcatccagaaaccatcttcccacccccagtgtgtggaaaaattgtcttccatgaaactggtccctggtgccaaaaaggttggatgggaaccactgccctagggtatgttctgattggaggtcattagcatagggatgcaggaggctggctagctagaagcacaaaattttatgttatttggtatggagataatatttggctttctctggttgatcctgagttggaagcagagggaaccaaaaatagggcagctggcagtcaatgtgccagtcttgatttttctgggccaactgttgcggagattaggatttcccttcctgaaatgatgtctgcagaggttatgggtcagagttctattggcatagatggtctggctactgtccatttatgtatttggtctctcaaaaacagatcccaggccaggtgcggtggctcatgcctgtaatcccagcactttgggaggcagaggcaggtggatcacctgaggtcaggagttcaagaccagcccaaccaacatggtgaaaactcatctctattaaaaatacaaaaattagccagacatggtggcgggttcctttaatcccagcttcttgggaggctgaggcaggagaatcacttgaacccgggagacagaggttgcagtgagccaagatcatgccattgcactacagcctgggtgacagagcaagagtccatctcaaaaataaataaataaataaataaacaaaaaaaccagatcccatatttggctaaggattcctactaaataaggatgaaatgtcttagcttaattctttaactataacagctttctatagttctcaagaataataagagttaataagggtattgatagaggaggagaatagaacaaaaaaagagagagatacattttaaaatctaagtggtaatggaaggttttaaagcctgtcagctgctctgccagcctgagtggcacaggcttttctcatttgacttcaaattgaaggtggcctcaattcacctttttccctctcccgtttggactgcatggcttatgcccacaggaacgtccagaagcttaagccaggaaatggacgtaatggtgtttgaggatgtggctatgaaatttacttagaaggagtaggctttcctggctcctgctcaaaggagcccctacagagatgtgatgctggaaaaatgctgtaggaatctggcctcagtagattgtgagattcaacttaaaacccatgagtcagttgttcagcaggatattcatgaagaaaaaaattccaatgaacagaaagtagtaagaataacaaggaataactcctggttctccattttaggagaaaactgggaatatcatgtcattaaaattcagcacagaacaaggagagacatttgagaagccatatgtagatagcatctataaaagtaatgaatgtaatcagtgtggaaaaaacttcaggcattttccaaaccttagtgtgctgaagagaacccctgttggggtcaaagcctataaaagtgtatgtggaaaagcctttatggatcattcctcccttaagaatcatgtcagatctcacctgcacacaaactctatcattgtaaggaatgtggacaagcctgctgttgttgctcatatttaaggatttctctaagtagtcatgatggagataaatgctataaatgcaaggaatgctgggaagcctactgttgccccgatcttttagggcaaatgtcagaggtcacattggaaaagtgcaacatatatgtaaataaagaatatggggaaggctttagtcatttttcatatgtggcaggcagactctaagatatcccccaaggatctctgcttcctggtatttacatcgttgggtaattgccctcccttgagttttggctggcctaataatttgcctgtaaccagtagaatatggcaaaggtgataggatttcactttcattatttggctgcataagattgtgacttccatcttgctagcagactttctctgatgctggctttgatgaagcaagcttccatgttggagaggtccatttggcaagcaactgaaggtggcctctagccaacagctatcaaggaactaaggttctcagtccacctatctgcaaggaactaaatcctgccaacaaccatgtgagtttacaagcagattcttcctcggttgagcttgcagatgagaccccagccctgtgatatcttgaggcaggctttgagaggccatgaagcagaggacccaataagtcacgctcagattcttgacccacagaaactgtgagataataaacgtatgttgttttaagctgataagtgtgtggtcatttgctatgtgacaataggtaactaatacatagtcctttcacaacaattcaggcttcacagtggagagaaggcttatgaatgtaaaaattgtagaaagatccttaatgagtttttaaaatttacaagtgagaacacacaatggagacaaactgtcaagatttaacgaatatgaccaagattttgttgtactatataccttaagacatgtgagaattcacactagagaaaacacacgagggagagccttcactaattgcttatttgttattgtacatgtgagaggtcactctgtagataaattatatgactgtagagttggaatttatccataagtcattttcaaatcttaggtaacatgtgagatctcaggctatggagagaccctataaatatgcaaaacataggaaagtctttagttgcccattattcctaggacatatagagaactctgctagagagaaagccttcatgcacagcgtttcacttattgtgtgcaagaaaatgccaagagaaaaatctcacaacataaaatctttttagactacaaatatggtgcagtatataatgctcaggtgaggggtacaccaaaatctcacaaattaccactaaaaaacttactcatgtacactttgggaggctgagatgggtggatcatgaggtcgagagattgagaccatcctggccaacatggtgaaatcccatctttactaaaaatacaaaaattagctgggtgtggtggcacgtgcctgtagtctccagctattcaggaggctgaggcaggagaatcgcttgaacccgggaggcggaggttgcagtgagccaagatcgcgccactgcactccagcctggtggcagagtgagactctgtctcaaaaaaaaaaaaacaaaaaaaaaaaccaagaccttactcatgttgtaaccaaatgctacctgtaccccaataacttatggaaaaataaaattaaaaaaaatttaggtactccaaaaaaaaaatcacatgtaccccccaaatatgtacatatattatgcattagtttttaaagatgctttattgttaaaaatgctgaagaaatgagcatatactgttggaaaaaatggcactaagaggcttacttgacacaaggttgccacaaaccttcaatctgtaaaaaacacaatatctgtgaagcacaataaagtacaataaaacaaggtatcctgtactcataaaaaaagaaaatccttttaaaatatggatctcctttatcaatactcatccttaaaaaaattgattcctagctcattaatttccactttttatgttccaatataaagaataagatgataaatatccctttaagaacctttcagcagtagcatataaattttgatattcggtgttttgattatgtttgggttatatagagattattttatttctgttagaaaatcttttgaatttacaggtgattgtgtatttttttcattatctcactttttatgtttttttcagattataaaagaatattaatttattgtagaaaatgtatttttaacattgaaatataaagttaaattcatttggcatccccccattgttaatattttgggttatttattttcagctttctttctgtgcaaaaggaaaggttttaaacgggaaaaaagcgaatagagggagaattcattgaaaggaagagaaagtcttttcttttatgaataaaataaattatcccttgcagatgatggtggtaaatggtaataaagggcagagactgaatatgtacagtgagacacatggactgtgctcctagaatacgaaaaaaatcacatttagttacgtttcaccgtgtgaaagcagttttgaaattttttttacttattttaaggcccgggatggaaataccatatcatttttctttcccatcactgtggttcctgcaacagcataaacaacttacccttgcttagcccttcagaaactatatttcagtctaggaaagtggagccccaatcccaagtgtggcaaatatctgttgtgcctcctcctcagccaggtagggacctattttagaggcacagtcctctccatgctttagaatttaaaacagattgtttgctttttcaagtataataatgacagaaaaatgctagtatgttggcagttactatagtaaccgggaacaacttaacttcttttaaatgggaaatggacatttacctctaagtttttgcttcatttttggaagccaagatgcagtcgtatgctttgtaaagattccacacctgaatggtataccataagttgtgtgtgtttgtgtgtgtgtgtaatttgtgcatgcatacatatgcataaatattaacacaaaatccatatgagacaccaatcatagctcatttttgaactaaattactttctgacagacatgtgaaattaattgaaatgcaaacaatatccaagagatagatttaacacatggcttctttttattatgattttatttttaacttacaggaaacagttctttctcttaaaggactaaaggatgcttgataactttgagtcatggaaatgcatttctttcagagaaaaagaatgaactctcattagtgaaatgactgtcaatatttacattattctgggcagcctgaactggagcacggagaataagggtgaatgggaagaagtcaggtatttttaatcaggaccaaaataaacatcaagagacaacctgaaatgtgagataaatctgatagccaagtatgtccaatctgaaccgtagatgaacaggctgagtacagcaaagtaatttgcttcttggaaaatgcaccttgaaatagacagctttataatgtagaatgattgaaatactttgaaattccaggcaaagtcataaaaatattcctgcttttaaaaaaatattcctgagcaaatctatcatggcattttaaggagtgctgactccataaattctgacttttatcaacagcacttcaataatgttcagaaaataaacttcacaggaaaaactcgggtgttcaattagtgttaaacgttttagggcagaaactgagataatgaaattatgaggacaacggcagcttgacgttttgtggctcacaagagatttatgcattccaatataacctcaagctacgcgtatggcataataaaaaagaatggattcctgacagggcagggaatttgactgtacttgtcttaatactagttctttgtcttaacggaaagactaaaaaaaccctgcccctaacttacttccagtacaaattcaggctttacttctccccaaaccctccaccattattactcagatgacatttgaatggaatatagcttctttcacaagaattattttctttttagtgcaaattgcgttaggctcacagtgggtcctatggaaattgctggtctaaaaaagaaatcagtagagaaatgcctggcttctgtactaaacaagggcaagtgctcacccttgcacaaggtttctagaactttagtgggaggctaaaaccgaatcagtggtggtaacagtctgtgacagcatcatctggctgtcctcttaccctccttgctagccccggcgtggatatgtttttttgggggtgggtgtggtccatcttggagtgcccctgtggaccttttatgatttctttcaaggccaattaggttggaggactgctgggaaaattgcaaagccctaggaaacatttccatgtctgactatcaggcatcccctagtagtctgcaaaaattcaagaactgcatgcagccagacggccggagggcttgttcctagtggacatctgaaatgacttaatagagtccaaaatgataatttggaaatgctggttgacttttcttttgttggctaagtgtactcttccaaggttagggggttgtgtcaataagctagggtagtgccttcgttgtagaagattacacttaggtagaaattatctcttgattacagtgaccttgttaaagtctagacttctcttttgaataactgttactatgcaagatgaagttcacgttcatatattgatatgcatggtccatcatccaagcacaagttcttataggggtagaggaattaaaatttaccagaggcaagttctctgaaattctacgtcgaatgaaggtttggagtcatggagacctgggtctagacctggcccaccacttgatcttgggaaagttatttaacttctttgagcttcagtgtcctcctctataaatggggataatggccacttaaaatgatggttgtgagggttaaataaggttgaatatataaagtacttagcacagtggttggcacatagtaaaaattcaataaatgactttttttttttttgagacagtctcgctctgttgcccaggctggagtgcagtggtgcaatcatagctcactgcagcctcaaactcctcagcttaagtgatcttcctgctgtgcaccccctcaaagtgctggaattacaggtgtgagccactgcacctacctgcatcttctgttgtgaaacttagttgaaaggataatctttagaatcagcagctggcaatggtaatgcacatatccataaaactcttcactcttcctggaaagtgatggtggggtacctcctctacctctcctgagttctttttctccccagcaactatgcatccaggatcccactttcagtgtcaggcttttaataaagataggaagaggcatataatgacagacatgaaaagaatctcaagagaccattctgcttctagaaatataaaagacaataataatggctaccttcctatatgataggaaacctaactgcattaaatctcatggaagcttctcaacaacagataagtctcactgtatccccattttacagctgaagaaactgaggcatagagaggttatcaggcagctcatggaaaaatgtagcactcaatcccaggttcacctgaaagcaaaacccattgtctcaatcatggtataatactgccttgtagcaatctagatagctatccatttccttttgaaatatctttttttttttttttttagatgaagtcttgctctgtcacccaggctagggtgcaatggcacgatcttggctcactgcaacctcccagattcaagccattctcctgcctcagcctcccgtgtaactggggttacaggtgcatgccaccacacccagctaattttgtattttttggtagagatggtgtttcgccatgttggccaggctggtctctaactcctgacctcaggtgatccacctgccttggcctcccaaagtactgggattacaggcatgagctaccgcacctgcctccttctgaaatatctttaaggatgggagaggcagcttcgtatttagacacctttacaatcaagaagacttccttgtatttagttgtgattttcatccctatgtggttcatttgttttgataggtagtctatagaaattggaatcgcgaaaacttagtgtgttcctgatcatagcaactgttttcaattacatgaatttaagccacctattagtctccttttctaccagtgaaattattcccaatacttcagtatataaggcagaatgtaggaaaataggtggtacctcgaaggcaaggaggccaaagaaagcctcgcgagaataattttgactcaatccagcagggggcaccctcgcatcagtgtgggtaacccctagggtgtcctgatcagggagaagcaagcaggtatttgtatctccagacctgtcagtcattggttaaggattgccccaatggggacataaatttccaagcactttgagctgtccatgtgcacaaagcaggctcattcagcctaagggcagcccccaaagagatgcaggtgccggcaattgggagctggtgtacttaaaaatggaaagacacctgaagggttaggggccaatcggggacagcgcctgccatgctcactaatgctgggacagtaaaaggatttcctcctgatgtgggcatttcacattctgttcatactacccacggctgcatttactttctctcctctcaagcaaagaagaatcctgcctctattacagaaacagcagagtagggttggaagaccatgagttttgtggcagagtcattgggtcataatctggcacttcctagctgtgtgatcttgggcaagttgcttcatatcctgagacctcaatctcctcatctgttgattagtgatacagcacttaccacatagggttgttttaaggatgagttacagaatgtatataaagtgcctagcagagcccagcacatagcaaatacacagaaaactttcttttacttctattgccttctccccaaactaccacaaaggaaaacagataagatgtttcctttaaataatctccaacactgtcaaattagagaacaccattattgaagaggcagcttctgagtgtccctaccagaaatacattaccctgcatggaaacagtaagtcactgttgagcatataggtataacatttttttttcttgacttgtgtcaaaattgatcattgagcccaagatcaaaaacacttccaaaaggtcacccatattccacaatgctgcggaatgctcctatgtgcaggcagaccaattttacaacatgggctgcagacatagaaagactcttgtcattagctaagaagccgcatgctgccacatgccagggcctccaacaatggaggtctgcacgcgtcttcctcaaaccaggagctgatttttctttcccttgatagagcatggctgtcaaggctgctcatgaagtgttttctaatttgaaaataacagcatgacctcgtaactgttagtagccttattggttagcatcgtgatcgtgtagagaaaacacaaatgaaaatgttactttgtaagtgcctgccatgattaaatgcaagaagaaaagggctcctacagactataaccatttcagtggctgtttacccactggatccaatcttgaccagaggatccacgggctcagtttttattgagtctaaagtgcgtcctgatcccaacatactctttctggaacagataaaagagacttgcaagtaatagctttgcttggtcaaatccaataattttatggttagaacatgttaatttctgtctttgctttttgtacataaactcataatcttgcactgtattaatgcataacacacacacacacacacacacacacacacacacacccctcctttcctcattgcacattcattttgtcccttctattttacatgcactacatgcaggtcttcctgggcacttatcatgtaagtacatacatacatatgaatgagtcctgcaaagcgatcctcattctatcatttttctccaagttgggtaatcagaatagccccatgctctcatctcacaagttgccagaaattatgttcacttatggctcactgtggggtctcgaatcttcctccgtgtgcacatgttcctctcactgatgctaatggaagttatgcatgcatgttatggggagaaagagccctgtggatgctctctcccacatacagattgaaaggctggactgaaaaccaaaatatcactttactgtttatttttatcacaccagtttttattaaccagatctcatatgatgatgtccaggcatctcaccagcatgattatgctgatggagaacatgtgtagctaatctcctgtcctctgattcatagactgggcttgagaaagctggaatgtgggcaagacttctgagccttccacatccacagtgaatgtggaattgtaaagatcagttttagattatttggcccacactgggattttctctgtaattgatgaggatcataagggactttttgctggaaaattgcaaagatctcagtgcgtcctcaaaaagcctcttgtacttccacagtcctgagaggaacagtttccaaaaggaaactataaaatatgttcactaacttttccctctgaatgaattttaaaaatattttttcactttgtctctctcccctcaaaagttgaagtaacacttaaacaagctgaactttttgtagtagaaaatttgatcactaacatggtctcaagagtatagattattaaatcattcaaccaattaaagaaaatcaataacttcttgatttacctctaagttccctaaacactcacatcccataatactaccagtattcaagctactaaggatactctgtttattgcttttcgaggaagacacttaaacagctgtgcataatatggaaaaagatccctttctagtcaggtgggagttatttgtatttctatctcaatgtatgattaaatatgattaaagatattgtgttgtaataaggtaaccttgaaaagtcaccttgggggaaactatagctgatggattcattagtttaaatgtaggaaatggatgcagctggtaagctgaatccaacgagtgaaaaatggtaacagtggtcacttcagcggatggaaggctttgtgacaaattctgcatttgtagccaagcacaggggtgaggagagtggttgtgtgcagcagcttcagtaggaaaactaagaaaatattaatagcagagtcaaaagcctagagaaggacctatgtgagggactgaagcgaataacagtttaagagcaagcccaagaatcaaggctctcctgggcccaaagagggcagcggccatggatgagctgagtatgcactcatagcacagcaaacatttatggagtgcttatactatgcacggtaccttgtccaggcattttacatcagcctgtttaattcttaaaataactctcagatttaggtattactggttgtcatccctttgttccaagcgagaaaactgaggtttggagaagatgtgaagaactttcccaaggtcacagagctaataataggcatgtgcatagctgattcaaattcaggtaggttgatttcaggacctttctttttactactctgcagtaggacttcattgattcaaagggataaaatggcagcactaactttactatatagaagctctagaaataaatcctgtaaaggaacatagcacaataaggcagggacaacataattttgtgtgccttggaatcatctattttgcacatcaaggtgtcaaaagagaggcagctgtgatgtactaagaaagttgggcttgtgcactgttcagcttacccagcatagtgcctggtgtcagcatgttctcatttagacacttttatatacgactctgggaagtgggcgttatggtctttataactggaaagtggcagagccagaccccaagagatctcaagactgactagagggccttagggaacaacgacagaagggcatatcttgagacctggctacagtagcctgagtaaagaaagaggtaatgtgaagcccacgtgtgagaccccgaaaggaagtcactcttctccttcaagagcaagggatcaaggcatgactaggaaggtgatcagcagattcagacttcaggttgttgccaacttctagatcctttgagcactcttcttttttcaggctgtactcactccctaggtagtttcctcttgttccatgattcaatgctatctctatactgatatctacaagatttatgtatctagccataatctttcccttgcctgcataatgtcaacttatataaaatatataatacaaaatgcctaacaagcatctcaaaaatttcctcatctaaaactggactcctgattctaatgtcccctaccccaaacctatacctcactaggtcttcccacttttggtcactagtgcaacgtccattcaattgctcatttcataaacctaggcagcttcatcagttcttttcacgtacctctcctcctcccattcagtctgttagtaagttctgtgagatatgtcttcaaaataccatgtatcagtggttgccaaaattgtctgcatgttgaaatcacctggggagccttaaaaattgatacctgtgtcccactctcagtgactgtgattttattggtctggggtatggcttgggttttggaaaatttacaaaatctccaccctagttgattgtaatgtgcagataagtttggtagccattgacgtatatctcaaatcattataccatgtacctcttcatctctactgcttgaataattgcagtaccttctaactgattgctcagttttttcactctttccacccatcatccattttctacatggatgctagagtgaatttttaaaataggtcatagtaagtcacctctcagtttaaaacatcctagggatttttgttgcggtaaatttaaaaccctttattaagccttcaaggtgctataggatttggttcctttgttcccctctgactgcagcttttgcacctactttcattcttgctctgttatatccacagcagccttctttttgggttctctaacatgccaatcttattcccatttcagagcttttgcatttttcttccttccgtctgaagcctcttctcccaagttttcgcattgctaacttccttgtcatttagatatctgcctgcctataatttcctcagaaaagccttacataaaacagtatcctccattcccatcatttactctcatattttcctcttcattttctttatagcgctgcgttaacacatttgttctgtctctctatggggggtgtgtgtgtgtgtggtatgtgcctgtgtgtgtgctagatctacatcccactactaaatcagaagcttgatgaaagcatggcctttgttttttttcttttttgtttatttctgtgttgtcagtatttagtacagttcctgccttgtagtggtttcttattaatatgtgttgactgactatctgaaggactaaatatagtattcagaaagatggctctgtcctggagcttatatcattcaagatttgtgattcagacaatcgtgctaggacatggtgcttatgtccatcagtagaagggcaagttaagaccccacgtctgatttctatgttttctttctcgtgaggaatgtccttaaatcttttatgggactcatgtgtgggaactggttagggaatagatgaacagaaaattataggatgtattagacagaatagtcagtttttgctgaggtaacaaatagcaccaacatttctagtggcttaacacaatgaaaaagttcatttctgactcacacgaagtatgctgtgggtctgggcaactctacaggaagctctcctccttcatattgacagctcaccattccagactactttgcttttgagacagctgcctatcaacatggccacaagagagaagttagacaattgcacaccaattcttaagtacttttgtttacattgactggccaaaacaagtcatgagatactcccagaggagaggaaaattataaatcttggtgagtgagtaggcatgtccaccacagcaggtacaggtcagggtggggcaaagaaaagaaacaaggaggaagcatttgtaatgtatgagcctggtgaagtgctgcagtctccacttctggtcaatgctaggaatgtagtggcgacactgcatttctgaaaccagataaaaataacagaaacaagaagctctagtagaaatcgggtttgacagcagtcattccacatacctgtccattatttttcacattccttagatttcaggcattaagatcgtaaatgctcaatcctttagagagccagttagctttgtgaagggaagatattttagttagctttgtgaagggaagatattttagttagctttgtgaagggaagatattttaattagctttgtgaagggaagatatttgcggcctcctgacttataaatccatttttctactcattgggtaactgtaccaagctttccccaaaaagcatactatgtacagcagaaaaacaaaccaaatagactcttatcagacttctcagaaaagtcccaaaccttagtggcctcaaaattgaattattacaatgtttgtgatcagggtctcccttgatccagcagttgataattcaggatgcagttgaaccgtaacctaattggcatgccatataaaggttgttatatctgtgtttgaagactaaacttactgtcatcttgatccaggtgcagttcaactcaataactttgatctttcaactcacttaattttatagactagtttcttccttggtcctacttaaatattgaaataaacaaaggacccttggctgccaatattacctggaaaccttaggatgtactttaatcaaagtaaatggctttggaatcacgattctcaaacagaagtctacattttctgagcattctcatggctcagggcaaaatttttctgtctcttaggtccgcataattattacaatatcagaaaatgttcacttggtgacttactttaaagttacttgaaagatataggcaaatgaaaagagaagaaaacgatgacagcgatggtttcaagatgataaactactgtttgggtagcattagctttggcagccacaggaatgtcatttagtgaattaattcacctattcagtgctgccttgaaaaggagcacagtttccagtatccattcttcaccccaggaacatgttccttacccagcaagatgagctgccctgagacaaccaacatctttttgtatctataaaagactaggttgaactatgatgttgagaatattctgttctacttcaatatctacctggatgtttcaaagacataatgaacactgaaggatgcttctcatgtatatcctacatatttcctattgcagtaagctgtgtctcattcatccaagtatcccttgtgcctaatgcattgtttcatatatgtttatggaatgaatgaatgaatatagattttgatgatatcgaaactccatgatattataactctttattctggaaatattaacggtgttattatagtcatttgcagactggtagaacaagatgatctaaagttagtttcctggcttttttctcagtggcttcctaacccttaagtgcttttacatgcaattgtttgtgtggatctgtaaatgcagagtatgcatacattcctgtatttgttttatagcttcctactcgagagataaactgtattttctctgtaagatacagaaaattttcatactggtgttgtgtagtgccaaacaccatgtattttttttccctgctgaatggtatattttgaaatgtgtttaaaaagaaatacatctataaatatgcataagtgtaaactttctaaagtctagtttttgtgtctatatttgtttctttgtaatttatgtgtatgtatcataatgtgcaattcaattagaaataaatagttgaggaaataagagaaataagaaaataagagcagttggggggaaaaagataacactatcaaagaggctggagcacaaacatatgtcatgaggtactactaacttgctccaagctctttaataggcaatgtataaagtggaattcaatcctcctacactttataagataaaactaggtgatcaggagtggcctagctattcctggcactgaagcctgaaagaaactagtcacataggtcctcaaagaggagacattgtgcaatctagttgataataccttcaacaacatcctcatagatgatacaatgagcttcacaagtctgcttctgataacgcccctccttttaggctggtgacattgaacttaatgttaaagcaatccaacagaggaccaatttgatgaggtcttagggaacaactttctgacatctagcttaatctcaagatagatttttaaagagtcagaggcatgagtggacaccaggacacttccataaattgtttcttccaattaagctttgggtaactattggctgacactgagttcaaggtgatactgttattcataaggggaatgaccttgggagccatggactcctgagatctcgggaaatgttgtaaagatagagatgaatcagactcagggattctagaaaacttgctgttggatgtcctccaggatcaaatataacatgtgactcaaatatagctctatttatgtaaaaaaaattcagtgtagaaaagaacagtcaatatagtatccactgaataacttttaaacttcttttttttgttgtttaggaacatacacaaatcataagtagatgcactgaaaattataggggattaattagaaaaatgaagatctaaaaaaacagaatttggtaacttacttttactgattctgagatcaagattacttagctaaaacatgaattcagagtcagtagattcacaatagaagcccaaagatttatagttgatgaaataatctaatctctgaagccataacccagaagaaaattgtgttctaaatgggtaacattcattttattttttattttattttatttcttagagacaagatctcactgcattccccagcctgctgtggtgtgattatggttcattgtaacctcacactcctgggctcaagcgatcctcccacaaagtgctaagattacagccgagacccagcaatgtgtagcatttagaatatactttcagagcagtttatgtgcttaactaatagaagaatcctgggacatataccaggattggatgactacataagcaattcagcgtctacagcatgcccactgaatgcgttgtgattgggggaatcacaaagagcagacgagtggggtccatgacaatggagagagcatcagtgtcatttatactggccttgctaaatctacacaaagctcttcatagtacttaggattttaaaaatctctcagatggcaccacagcaggctaatgtggtggcatgttctgaaggcattaatttgctttttttctcttgctaaatagaggaaaaaagtgaattttagtaattaataggcacttacccttctttcgtcatattgtcagcttcagttggtttctgtcttgccattaacatgtctaatgcatatgtcaagcggaagcctgacatgctagtggcaaacagaatattatgtaaaggcggcaatgtgttaaaacaattgagcgagcaagcactaaagtttgctgctcaggccatatgttgtagtgtttaatttcccgtagtggagaaacatggttgtcagagaaaaagatgatgaatacatttactttgggcaacttattacaatgaagaatgactttccagaggaagggaacagaagaattaggcttgcatcgggagcatatgggaggcattcagacataggcaggatagccaggactgcatgtgcttacaaatgaaagacacttaatcaatgcatgtggctggtgttgacatatggaagtgacaaatgggttttgatttggaagacaggaagaaggttaacggtagtacaggtggttacagaatgattgatactttgagtaactaacagagaacgaaaatgtgacttttttagttgggcaacagactccagagaacaatgtaatttagaaaaatacagaacgtgaaatgatccagggcaggtcacctggctacaagaagagctgacagacagaacaagctgatgatcctgtggtgtgagccaatggtggtaaaagccgacgtgctgggtaagaagcagaggccaagagctctaatgggacaaatcagaaagtgctgaggctgtgggagaacatttatccacaccccacgggagatgatggctaacaattttcccaggcttaacgtggtacaaatttgatttgctcacctagagcagacttggagcatccgaatatctaaataaagttggggaaaacatctgctgatatcaagatcctatggaggggacctgatagacaaataaacattgtttgtatgttttcctccctacaacaatgatttctaggtaagcctacgcactcactttcttttctttagttccaaaaatgcataggagaggtttcttcaattacctttatccaagtggtatttaatcccatctttcaggggtcaaaggttggctcatgtacttggtaaagcaacctatgatttaatatttcaatcctgcattctccacttgtttttagttacttggttagtggggatggccttggggagataatgtttcaggagaggtgattttgatcactaatgattattacaaagaatatataatgaccagatcctactcaaaataccataaatacctacagttaggacttgctgtattcgctaagacatgatactaaattggtgcctcataatgcttcatttaaagtggattagagtaatgggtttaacagtaaaaggcagcgtggtggtgttttataaattgaaagcacttgccagacacttgaaatgttgatttagctaacaaaatcttttttttttttaactcaaacttctcatgggtcaaagaagttagaagtctcccttcagatgtttcaagtatgagactttaaaataaatactgaacccaagcaactcttttcacactagtctttaactggtgtgaggaggtgtgaggaggtgatctgagagaacagggagggactattaaaaacggaatatggagattttgaagtactggtatttgcctgcaagtcgaagagtagcccatctgattccatattttgtttatgctctgttagtccttacatttttctgaaaatttagttttagacaaggagagtctatgagttgcagatggtattgattaaattctatgagtccaaattgatctaacataaattacccttgaaaccaaagcataagaatgagtgattaagggaaacgccagaaatgaggataattaagttaaactaccaattctcttacaattgtgaacaaacagtgcctcagtttcctgtatcagaaaatgaatttaacacttccccttctcatcaagtactgtgatgctcaattactccctaaaatctacttggaaatcttcacacaaaaggcgctatggatgtgaaatgaaatgttagcattcagtatcagatagttctcactctctttactccttttcaaggatctcctcctctactttccacaatatgcctcttgccctgacaccctgggtcccttaactaattctctaatgtctgaaaactgcacttgcaggtaaagtgacaatagacctggagctgccatcacaccccctgaaaaatggtttaaatcattttttttttttctgaacacagatgcactcttgggagtgtgatagatggtacagaaactagcagggcaaaacaatcactgttagagttactgaaatctgtatgacctaaaaataggcaatatgagcttcataaatggcagaggtgggatcattgtaattgttgaaggtgcacaggctctatgcacatctgatttgagggaggaaaaataaagtgagcccagtccttgtagggtctgagtacagtgggttaagcagggagtggttaagtggaaaattatcagagaggaataagtgaccagtatgtgagatctgactttctgtttttcaagaaaatatagaaatatggatttttatgtgaactccctcaaatgttaaatgttgttgacaattttttaaaaataagattgtttgtcaaacagaacatgtatgcaggccatgtgggatctctggatcatcagtttgctacctttgatttgaaaaatgtctcaaggcacaataatgtacttttcagatagaggctcaggactgcatgggctcctttctggagcaaaagatctctttttcattgattgtagctgaaatcctccccatgtgtagaattgtccttaagccagttcaataacagtaattcctggagaccaaccacacgccaggcactgtcgggaatatagaatgtgaatgacacaggccctatcctcaaactgctcacagactaggaggcaagattagacaaattcactaataccctcaacataaggaggaatggaataagtgccaagacagcagcacagaccaagtgccctggggctccaaggagggagtgagcacagacagccgtgggtttcagggaagacaacttcagggagggaacgcctgaaatgagccgtgagggtagatggggttttggcagatggagatgctggaagagggcatttctagcaactgcatgagcaaggacatgaatgcgggagaggctggggcttgggaagtatgcacaggctagttcgactgaagtgtaagatgtgtgtgggagattagtggagataaagcctgggcaaaacagtgggctccatattgtggagggccttgaatgctctggtggggtctatgcacctgactgtaaataatgagggggaaatgaaggaggttgaactggatagacttgtacctcgtcaatttctatttgcctgaatccatctacctaaagacactgacgactttcagttctccagcataactaactgctgttaagtctctggctaatataagcccaggtgggctgtatattaggagttctttccctccagtgagtgagatctagaattaggtttacttttgtaaatctggaattcatgatgcctagggcttgtgctcagtccacaagatggcattttctcccatgttactgatgtacactcaagaactagaattcagccttgaacccaactaagcctgcctagagctctaaccaaaccttcttcatgcttgctgacttaatgatagagtgtgagaggaatgcactgtgctctgtctgatctcagaaactagctggaaaacctttccaatctgtgtggactatccctcaaaaagcaggaccttcaccatctgattggaatacttaaggctgacagattcccactaccgtgacattctcactcgtggatactgcagtttgggtggctgactactctctttggagccacattccttactttcacatattgtcctcatcttgcaggatttataaattgatattaatttaaataaaattaaattaaaaatacaattcttccattgcactagccacatttgaggtgctcaatagccacaagtggttagcagctgccttattggacaacacaactataggacatttccatcattgcagaaagttctatcagataatcctaaatactctgctttgtttattaaccgaatggctcactcttgaaacatgacaacgtggctataggtgcacatgcattcatgcacaaacccacgctgagctgatatagctttactgtcagctttcatctgcctgaaatggggtagcagaatagaggaagaaagaaatactatttgagggactgacatgcacaccaaggaacagatatttgactggaaaatttcatcagaatggaatgtaaactaataaaactaagggaaaaaagcagaaaggaaaggaaagtagtgatacactgtataattctagagcattaataaaaatacatcaatatgaatcacaggaaattattacaacccctggataagtataaacaagggccatatttgaaatagagtttcaaattataaggtattatacacaataaaagatattgtgaaactctgcaaagaggtgccattgagagaaaccaaaaatgcctccagcctgtacacatcttgtttgctcgtaaaaatcaaggatattgaacttttgaactctataccaatggaaatttaacatgctcacgcttaagatggtgtcataagagagtgaaacttgttaatatgggtcctagagtacctgcatgctgtttggagaccccagactccagaagagaccctggactagcaagtagactctgtgaagcaaagatctagttggtcatgtgctccaagtatccctagagtttagtacagcacctattatacagaacactgtaaataaatgtttgttaaatgaatgaagaaaaggacagatgagtaaagtaagactttgagtggccccatgttaatctggagccttcacttttatcctaagataaacttgttagcctccttagagtcaagcatgggactcaattatttattctttgattaaaaatatatacaatttttgaaaagattatatagtcaaatgattctaaatatgcatatagacgtaaagtgagatatcttagattcctgtaccctatacccccagttccgatgcccatctcttactagtaaccactgtatttagtttcttataaattcttccagttttttaaatgggtataagaagaaatataaattcatgttcttcttttccctctttttatgtaaaaggtagcttacttgacatattgttctgcattttgccttttttctttctttctttttttttttttttgagacaaagttttgctctgtcgcccaagctggagtgcagtgatgtgatcttggctcactgcaacctccgcctcctgggttcaagtgattctcctgcctcagtctcccgagtagctgggattacaggcacctgccattatgccccgctattttttttttttgtatttttagtagagacggggtttcgctatgttggccaggctggtcttgaactcctgacctcgtgatccaccccactcggcctcccacagtgctgggattacaggcgtgggccaccgcgctcagcccgcattttgccttttttcattcaacatctcttgagtatctttcctcattgctatggaggcagctcactcttttatttttttaacttttgtagtattctgttgtatcaatgtatcacaatttacgtaaactgtttattttagcaatgtactggattgaacaatgtaggttatttcaaatttttggtcttgcaaacaatactgatgtaaataccttaaacatatgtcctttcattcatttgcaagtacatatgtaacataaatttccaaaagtaaaagtgctggggtgaaagatgtatgcatttgtaattttgatggattttgctaaattgctctccatatggggttatgctaacatatactctcacaagcaatgtacgagagagcgtttcttacagcctcgtcaatggagtgtattatcagactttgggatttttgccaacctgataggagaaaaatggtatctcaatatagttctaatttgcatacattttattatgagtgaagtcgagcatctttccaaatgtttaagagccatttgtatttcattttgtgtgaactatgtgtttatatcttttgcctagtttttcctattagcttgctaggctctcaattttgtacttgtagaaacatttatttatttttattatttttgtagaggcagggtcttgccatgtttcccagcctggtcttgaactcctggcctcaagcagtcctcctgccttaaccttccaaagtgctgggattacaagtgtgagccactgtacctggctgaaagtttttatctataaatagatattagccatttgtttatacatgatttgcaaattttttttttagtttgttgggtcttctatcttttgcttttgcttatgagtgtgtgtgtgtgtgtttgtcatatagaagttttaatttttatgtatttgggtttatcaacatttcccttcatggcttctaaattttgaatcaatttttaaaaatatttccattccaaggattaaaattctaccatgtttgtttagtaattttatggttttatttataccatctaaatttttgatccatttagaatttatcattgtataggatgggaggtaaagatccaactttattttttccaggtgcctacccttctgtctcaacaccatttatcagataggccatcgtttcccctccggtttgaggtgccataatgtacaccaaatttaggaatggtgattgttgaattgagcagatattgacaaacatcctacttgaacattttacttgcctgtcgtgaaaactgctgaggctgctttgataggacagggaagaacttctgggtcttctagctttgctacatatctccagtaggccctcttctggctccaaaaactatggacaagaaaggcaaagttcctttcatatgaacttatgagggtttaaggtctctgtagtcaatgcttcttgcactccagattatggcaggagtacaggctgtacattctcaaagagattacaggagcaggcattctagattcatgtgctatgatttaaatgtgttccccaaagttcatgtaatctccaatgagaaatgtaatctccaataaaaagtgattagctcatgagggtagagccctcatgaatggattaatgctgttatttcaagagagggttcattattgcaggattgggttccttatgaaagggcaagttcaacctctttttctctctctctcacccaggatgacataaataactactcccgacatttggtcctttcatcatttttgttcacgtcattatgaaatttgccctagcaatgagcaagtcttagctttcacattagaagagctcatactacatttgaaaatgatgccttctgctatgttatgatgcagcaagaagacccttaccagatgcagctccttgatcttggacttcccagcctccagaagcaagaaccaaataattttctgttaattataaattacctagtctctggtgttctgtgatggcagcacaataaaatggactaagacaaatagaaatagaaaattgtctttgatggtaaactgctttgcccaagtgttttctttatctgaaaaaggaggaaactgaagtaggtgcactctaagatccctgtaagtgctgacattccgtgaatggtaagcagaacagtctgatatgaacatttcagcctcacgtcaagagggctggattgtattccacactcagttactggctccactgcataaatcgtgccctccaatgaggtcagcgccagggctctgtgtgtaaatctgagaagcagactgaccacttgtgaaatggctagagaatgggagcacagatatagaaagatttatgatgtagcaggagatttgcaagactatgagggaatgagagaaggcaagtatgcactctcattgcaatttctaagcctgtaatcatctatctgcaaacttttgaacctgtcctattgccctcctagggcttatacactttgacattttcaaatatagtatgaactcttctaatgtgaaagcaaagactcttgctcattgccagggcaaatttcaagataacatgaccaaagatggtgaaaggacaaaatgttgggagtagttatttacatcatcctggataaagagccccacgggtaccatatcaaaagctctgtttatgacattcaaaaaaacctagccaactagcagcaggaggtgttggatgggctggcaaacattctttttcttttgtagatgctaaaagcatcacagatttaaatcatagattggaataacatatctaagaatggctgggaggcaaacatatttgagtttaaacaatatgcattaaaaatacgaataaccatcttcctgtattaatcacgtcaaatgattttgtttttctacactatgcagatgtctcttgctaagcaaagtaacacatttctatttcaaggctattaacagtggagcagctgtacactaccagagaatttttagaaatcataatgaaattaaacagcagatacaaaaagaaaaaaaaaagatgccttctttagagctgtgctggttgatggtattatcttattaaatatatatttcaagtacatgatacatttccatagagtgatattagatcagtaaattgtaactaattgggacagaaccttgaggttcacaaaaaatccccacattaagagaacaaaatgctttcttctaaaggatcaagacaacgatttattcatatagtatgactctctgttaaatgtgtaaaagatgttctgtaggtgaagcaccaattgatgctgaagagtgcactatgaagtttccagtagcagcatcagttaatagcatttactgaataaccactgtgtaccaaatggcattcagcattcaactctggaagttaagtgtctgtattttacccattacttccagtaagggaaatggagtgtttttgttttgttttgtttgagagagaatataaaaaactgagatgtatatatcaaaacataatatatgtatccatttcacagttcttactctttttactctttttattcctgcttttgtgaactataattgtatatatttacgatttacaacatgatgatttggtatgcatatatattgtaaaatgatgagcatgatcaatttagttaacacatccgtcacctcacatagctaccatttttttctgtgtagtgagaacacttaaagtctactcttttaacacatttcaagtataaaatataatattattaactatagtcacgatgctttatattaaatccccagaatttacctttatttatttattttttaggtgtgggatctcactctgtcatccaggctggagtgcagtggcggatcataactcactgcagcctccaactcctggactcaagcgatcctcccgcctcagcctctcaagtaggtgggattatatgcataagccccaatgcccagctcagaatttatttatcttttaactgaaagctagtataccttgagcaacatctccccatttcctccactctccagcccctggaaatcaccattctattctctgtttttatgagagtaacagttttagagtttatatataaatgaaatcatgcagtatgtgtctttctctgcctggtttatttcacttagcataatgcacttcaggtttatccatgttatcacaaatggcagaattttcttctttttatggctaagtaatattctattgtgtgtgtgcatatttttttaccttccattgtgtgagtatatacattatatatgtgcgtatgtatatatagacatatatgtgtgtataaacacacacactgcatttcttttacccatttatcaattgaaaaattttggttgttctcatgtcttaactattttgaataatactgcaatgaacaggggaatgcagatatttctttgagatgctgattttatatccttcagatatatatctcaagagaagtggcattgctggatgatatagtggttctatttttaacttttgagtagcctgcgtattgttttccataatggctctgccaatttacatttctaccaacagaacacaagggttccctttacttcacatcctcaccaacacttgttatttcttgtctttttgataatagcaattctgacatgtataaggtgatatctcattgtggttttgatttgcatttacctgaggattagtgatgttgagcagcttttcatgtgtctgttagccattgtatgtcttctttgggaaaatgtttattcaagtccattgccctgttttttgtttttgtatttgtttttgtttttgttttttgagatggagtctccctctgtcacccaggctggagtgcaatggtgcaatcttggctcactgcaacctctgcttcccgggttcaagcaattctcctgcctcagactcctgagtagctgggattacaggtgcctgctgccatgcccagataatttttatagttttagtagagacggggtttcaccatgttggtcaggctggtctcgaattcctgacctcaagtaaattattactaattcaaggcccacctcggcctcccaaagtgctgggattacaggcatgagccactgtgcccggccctccattgcccattttttaattgaattgttagttttttatttattttttgctgttgagttgtatgagtttcttatatattttggatattaacctcttatcagatatataaggtttgcaaatattttatcccattccataggttacctttttattttattgtttcctttgctgtgcagtagctttttagtttgatgtagtcacacttgtttacttttgcttttgttgcctgtgcttttgcttttggtatcatacttacccaaaaaaataattgccaagattaatgtcaagaagcttttatcctatgttttcttccaggagttttatggattcaggtattacatttaagtcgttaatccagttcaagttaatttttgtaagtggtgtaagacaggggtccaattacattcttttttatgtggatatcctgtttttcccaacactaattatggaagagactattctttctcaattacatattcttggtgcccttgtcaaatatttgttgaccatacatgtatggatatagttctaggctctcaattctgttcctttgttctatgtgtctgcttttacaccagtgtcaaactgttttgattactaaagctttgtaatatagtttgaaatcaggaagcatgttgcttccagctctgttcttctttccaaagattgctttgactttttcatgtattttattgtttcatataaattttagtgctgttttttctatttctgtgaaaaaatgccattgaaattttgataggtatcacattgaatctatggattgctttggcatgtgtaaacattttaacaatatagattcttctaatccatgaacataggacaccttttcatttatttgtgacatcttcaatttctttcattagcgctttatagtttttagtacatagatctttcatctccttggttaaatttatttctaagtattttttgatgtgattgtaagtgaaattgttttatttctttattcagatattttgttgttagtgtagagaaatgcaatggattctttgtatgttgattttgtatcctgcaactttactaaatttattagtttgaacacttttgatgtaatctttagggttttaaaaaatacataagattatgtcatctgcaaacaaggacaatttcccttcttcctttctgatttggatgacttttatttctttttcttgcctaactgctctggctaggactccaaggtaccttgttgaatagaagtgcaaagagtggcatccttgtcttccttcctccctttctaatctcaaaggaaaagcttttacttttcaccataatatggtgagatctgtgggtttgtcatatgcagcctttattatgatgaggtgtattccatctatacccaatttgttgaaagtttttatcataaaagaagattgaatgttgttaaatgctttttctacctctattgagatgataatatgatttttatctttcattttgttgatgtgttatatcacatctattgatttgtgaagccatccttgcatcccagggataaagtccacttactcatggcgaattatgcttttaatgtgctgctgcatttggcttgctaatattttgttgaaaattgtttcatctatgtttttcagtgatattggcctgtaatattcttttcttgtactgtccttgtctggctttgttatcagggtaaacctggttacataaaatgagttttgaagtgttccctcgtcttcaatttttttggaagagtttgagaagaattggcattaattatttaaatgttgggtaaaatttagcagaaaagccatcaggtctttgattttcttttatgggatactttttgttactaactcattctccttacttgttatggaactgtccaaattttctagttctccatgattcagtcttgctaggtgtatgtgtctatgaatttatctatttcttctgaattgtccaatttgttggtatataattgttcctagtagtcctgtgtgaccctttgtagttctgtatcagttgtaatatctcgtcttttacttctgattttatttgagacttttctctttttatcttagtctagctgaagttttgttgattttatatatctcttcaaaaaactaactcttaattttgttgctcttttctattggtttcctattcattattattttatttatttatgctctaatatttattatttccattcttccactaactttgggcttagtttgttctttttctaggtttttgaggtttaagtttggttgtttatttgagatctttctttttttcttaatgtaggcatttattgctataatcttccctcttacaataacttttgccacaccccacagttttggtatgttgtattttcattttcatatgtctcaagatattttttgtttcccttttgatttcttctttgacccatgggatgttcaggaatatgtagtttaatttccatgtatttgtaaattttcaaattttcttccttattgatttctggtttcataccatagtgcttagaaatgacactagatatgatttcagtcactttgggtttaagaacacagataggttgaaagtataggcatggacaaagtctctactcttattgtattgctgtttatttctcctctcagttctgttaatattcactttatatattaggtgctccaaagttaaatgcataaatatttacaattgttatattttcttgatgaattaacacctttatcattatatagtaaccttctttgtctcttgtaacagtttaaaaatatttacttatccttaattgacaaaaattgtatatatttattgtttacaacatttttgaagtatgtagatagacactataaaatgattagataggatttatcaacatatgcattacctcacatacttatcttttaaaatgcaagaacattttaaatatactcttaatgattttcaaaaatacaatatatttctaactatggtcaccatgttgtacaagagatttattgaacctaatcctcatgtctaactaaagatttgtatcctttaaccaacatctccccaaacacctcccagagagtttcccctggtacctaccattctactccctgattctatgagttcaactttttttagatttcacaataaatgagatcatatggcatttgtgtttcttgtaacagttttttttcctaaaatctattttgtctaatataagtatagaatttgtccatgccttactttcaacctatctgtgttcttaaacctgaagtgagtcccctgtaggcagcataaaattgaatctttttttctccactctgtcattttagtcttttgattgaggaattcaatccatttacatttaaagtaattattcataggtaaaaacttattgccattttgtgaattgttttgtgactgttttttagttatttttttccttttttcctctctttctagcttcctttatgatttgatgactttctgtggtggtatgctctgattcttttctcttagtcttctgtgtatccactacaggtgttgctattaccgtgagatttacataaaacatcttatagttataacattatattttaagcagatataacttgagtatatgtaaaaactatacttttacttcccacctcacagtatagattattgatgttataatttacatttttatgtctgtgttcactaacaaattattataattataattattgttaagttatttattttttaactattatagtagagttgaaaatgattgccaggtatttggcagcactttggcaggacgaggtagacagatcacttgtgctcaggagttggagaccagcctgggcaacacagcaaaaccctgtctctaaaaaaaatacaaaaaattagctgggtataattccagcttcatgggaggctgaggtgggaggatcgcttgggaggcagaggttgcagtaagcaaaggttgcaccactgccctccagcctggatgacagagtgaaactgtctaaaaaaaataaaatagaaaatagtttctatgccaccaatacaatataattccaaatttgactatatatttacttttaccaataaggtttatacatttacatctttttatgttgttaattaatgtgctttcatttcagcttgaagaactccctttagtatttcttgtatggcagatattgtagtgatgaactccctcgattttgtttgctgaagtttcttcttgatttttgaaggacaatttttttctcgctgtagtattcttagacgaaaattttttttctttcaatattttgaatttatcatttaattctctcctggcctgcagggttgagaaatccactgatagttttttggaggctccctcattatgtgatgagttgcttttctctggctgctttccaaatcctttatatttgacttttgtcagtttcggtagacctattcagttttaacctatttgggaactttcggccctaatggatctggatgtccatttctttctccaaatttcgaagttttcagtcactatttctttaaatagactttctgtccctttatagtttccccttctggacctcaaaaatatgtatagccagatgcagtggctcatgcctgtaatcccagcactttgggaggctgaggcaggcggatcacttgaggccaggagttctagaccagcctggtcaacatggtgaaactctgtttccattaaaatacaaagattagccaggtgtcgtgtgggtacctgtaatcttagctacttgggaggctgaggcaggagaatcatttgaacctgggaggcagaggttgcagtgagccaagatcatgccactgcactccagcctgggcaacagagcaagactcagtctccaaacaaaacaaaacaaaacaaaatgcatataatattaacttgatgatgtcctataaattatgtaggctttcttcacttcttttcattattttctttttgctctcctgactggataatttccaatgacttcttaaatttcactgactctttcttctgcttcattaagtctattgaagctctctattgaattttagtcattgctctaggatttatttttgattttttgatgctttctagttgttcatctgtgttttcttatagttcagtgaactcctttctgagcattattctgaattccttgtcagtcagttcatgcatcttcatttacttagcatcagttattggagctttattagtttcctttggtggtgtcatgtttccctgattcatcataattggtgtatccttacatgggtgtctgcattcgaggaagcagtcacctctttcagccttgacaggtttgcttcagcagggaaggaccttcactagtcagcccagcctggagttctgaatgaaccaactgatagtgtctgaaggtagggaaagcttgctgaaggtagggaaggcttgttgagcaaagtaactgtcccatgctttgaggtctggtggtactactggctgggccccacagtcagatgggtccattagatggacttcatgttagagcaggactcagggagagatactggattgcatcttcaatttcccctggtcaggtggtgcttcagtctatgtttcccggccaaatggtgccactggcttggctccatattgaggtggggtctcaggctgtgctctgtgattgggtggggctgcacgctgtgcgtagcagttggttgggatcacagttgggtggagcttctgccttggccctctgggcaggcaaaaccacaggttgggctctgcagccaggtgaggctgttggcttgatttccctgactgcgtgggacttctggctgcacttagtggccaaactgaaccactggctcaggaccccagctgggcagaactgctgaccatgctccctggctagatggggtcactggcttggttttgcaggtgggcgggctctctggtcagtcaaggtcaccagctgggatgcagtgccaccaccaagatcaatgtactggttactacgagtcatgccctccttctctgtccctagctaatcccaggtggtctatccctgccaatttctgcagtgctctccataaggtgaagtgggcctcctggcaagtgcctctgaatgttgaagaagctgaatatctatcttggactctctttttcccattggggaaaccagaggcccaagagaacctgttgacgtggcactgtgctagcctgagagactagcacaaggtgctagctcaaggtgagactgttactcttacttttttaatgtgggttttctgttttgtactccgaaagggtgctttgggcctcatccttgggttctgaaattttcacaaaggcattcttgtatgtggatagttgttagtcatatttctgtgaaggggactaaaactgagcatcttctattctgccattttgctcctactgtttcttcataatgggtacatgaagcacataaaacttaaatagaaacaacaacaatggttgattattttgcctttggaaaatactattttgatgggaaaaaatagtttcttatttaccatatgctaatattggtcacattagctccaggaaagcaaggtaatacgttgaatattctgatattatagatgggataaaacagacaaaaggctaagaaatgaatgaaaacatactagttatgttggtggctataaatttttgtgccgtttttgttatactggagaattatttttaactctcttatttatactatgtaccaccattttgttcttataaagcacaactcaaaacttcttcaaagccttacaacatgccgcagaataatgtgtcactattgcgttgcttatgaatgttgaacaccttgcaaaggtttttattttagagaaatattagtcttcaatttcacatacctgaagttaaaatgaatcacccaatttatgtctgttttgaccttatgatatatgttgaatattcactaaaaaatctcactggagttaggcacacttgctttatacaaagcaaaataagacacatctaatggagctgtgtgagagagccccttgttggtgggttctttgctcttgcaaagctttggtcagcaaaaccaacccatgtagtagacaccaaccagagaaactataccatagcctccctttatagcaggagtagaagagaatgcatctatattttcggatttgttgttgttgttgttgttctgagatggagtttcactcttgttgcccaggctggagtgcaatggcacgatctcagctcactgcaacctctgtttcccgggttcaagcgattctcctgccttagcctcccaagtagctggaattacaggcgtgtgccaccatgcccagctaattgtattttcagtagagatgggtttcttccatcttggccaggctggtctcgaactcatgacctcaggtgggccgcctgcctcggcctcccaaagtgctgggattaccagcatgagccaccgagcccggccttgcatctatattttcaatgtcagttttcccccattcctaagtctccaactaaaaagctaaatatataactaatatactgggataccatatcatttctttattcaggagatgttggtattgaggacaggaccagaaggaaatcacataaaatcactacttcaaactggtcctctgaggaaatcaaaataggacaatccatttccatggattcccaacttccaaaagtattctaattttcccagacatggctttcttatttaaattaaaggctcagtttcctgtcttcttttcctgcctaactccagaaaacttctaagggagcaaagtaatagagggctccaattatctctagcacactctgggagcctttataagggcaaaatacaattcgttctacagcaaagcacctctaacacatggtctctaagagaactttgatcatgtgccttcgatttttttttttttttgcctatcagaaatattctatacttcttttttcctgcagagtcaacacataatattaaacagcctgtctgcagtatctaattaacaaactgactgcagatcacttacaacataaaatattaaatcatctaaaaaactaatattctccacacctcataaattaaaataaccaagagactgaaatgaaataaaaccctgatgcatatcgttctgggcctttgccccccaaagaggctctattccttgaagcatttaaccatttcaaagaaaaaaaatatatatgcacacacacagagagacacgcacacatacatgtatatcaagcaatttcaaaatgctttctagcgccagtttatacttcatcacagcaactctaacttgagacctcagcctgtacttctcttgatcttttgcttcacaaatcattttaagttcagatatggagctcatcagttatgtgtcttttcattataattgcaatgcagtcttggagctcagttctgttcccattggctcaatggtcatcatttatctgctttgtatatttaggacattatttaacagaagcagcaatctgtttgaagaattcaagggccatttgatattaacacagagaatgattaatcaaagagcatttggtcctaaagtatcaagaggagctgaggtcattagcagggcaaaaccaggaagcaagctttgactaagaaaatgagatgggccaatactttgaggatttaaaatataaataaataagaaggttatggtcattcatttctggagcttttactttaaaggatgactgctttaagagatctgaaaaaatattacattatttcttaagatagagattattttctttacagtgaaatatgaaactttgcatccagataatagctgaacccatcagtgtctctagtaataattatttcttaatactggaatatttcaattattacatattgtaaatgagaaatatcaacagatgcagagctgagcattggatatgagacagagctggactaattaaaactgttaccctagtgagacttctctggcgctccaaggtaaggccttctctgccaaagagacagcggtttaatgtaattatccattccaaattagttcaattttctacatttttttgtcagtcatatccatcaagcatttgccccattgtatattagggaaaatgggaatgaacaccccaagaacagtaagaaaaagcaattatcttaaatagaaaaaaaaattatcttaaaaattatccaaatgtatcctgaatttgtatcctatatttgtttttactgctgctgtgatgaattgccacaaacttcggcttaaaaccacacacattattattccacatttctacagatcagaagttctccatatatctcattgggctagaatcaaggtgtcattagggtgccattaggagattccaggacaagccctgcctcttttcctgcctctagaggtcgtccacttccttggctcatggccccttattctatcatcaaaggtggcaagatcaggccaagaccttctcacagtgccatctctctggtcatctcttccaattccctcttctacttttacagggacccttgtgattacattggacccacctaataatccaggaaaatctctttatttagaggtcagtggattaacaacctttattacatctgtacctctgcaaccttaattcacctttgccacataacctaccatgtccacaggttctgaagattaggatatagactattttaggggaggaagggtgggcattactctgcatactaaaccaggattgggttgtattttatttaagatgtgatcccaggaaggactacgagggaattaagaagtgagacagggaaggaagaaaagcaaataaaaggtgtgttatgaacaagctaccgttgcgggcaattggcgttcatatcttctgggaaccattaagcgaatgtgtggaacatgtcttagaactgtaccctgagtagtgagaaagctagggtatttatccacctacttccatttcttattacttcaaggtgttccaggggtattaactctctcattgcagttacctctttcatagtgttagaaaagataactgcaagtagatctaatttgcatcattcttataggacttcatcccagaagacagtatccaggtattaaaacttattagatactttggcattagttgggtcatatggatatccttgaaccaatcagcatggacagagggatcacctgtcatgattggttaggcctgaaacttgtcccatcaagcacgtgatgaatggcccccgtagcatcacacgggatggaggtagagcagttctccaagggaaaaatgaaagaaacaacaatcagtggtttctggaagaatgaaagaatctatagagggcccacagaggccaatatcaaagaacaggctttggggttcaccactgcagcaagcccctccagcacacagaggtcccacctcataatcacaagtctgaaaagacaagcaacatggtgaaggaaaggaagaaagcaaaaccaccagagacctacattatcacaactccagggctggggttctctggagtgagaaaagccaggccgtggaccatccttgatatcctgctttaaactggattctagaagtttacagagtgaggctgccctagaagatggtgatataaaagaaaaatactcgagaaagggcaagaaaagaatgagtcatggaaaagaaagaaaaaaataagcaaaagatacattagcacaaggatatattaagggaaataaagagaagcataaacaatggaaatttaggacaacttggaatagaaacaagtttttgaaaagtagaagttgggcataaaattagtaggacatcatagaataattgcatcagttagagataagtctagtattttgatgagtgggtacctgttaggctttgtattaagttatctatctatctatctatctatctatctatctatctatctatctatcatcttctaatctggaccttccagggttagagcttgtctttggatgataatgcaactaaaattcaaatttgactcctactgctttggaaaaatgtctcttattttgcaaacattttgaaaacgttgcaaaggggaaattttataacacaatgaaaagactcctaaaaaattcttctttacccatttctcttcctaaagctccatactttccctcagtcgctctgtctccaccattgcacccatgccactccccgcccccaaatttcagtccctatgggaccactacttagtctttcacatcttctcccactttttgggtattgttttcctccctatgtagctccttgcccttaattcactcagttgaacccggagccaagcagcagtatacagaagcctctcaggaaggcagagaggagacactcccatacttacaccatcacatgcttggctctgcccctcatgtattctctcgcttaatcccaacaacagactgagaaggtaggtatgatacccatcattcgatagatgaggcaactgaggtttaaacccaaagctggctgattccaaagtctgtgctcttaagtacactatgctatatatcagtggttgtcagactttttggcatgaattaaaagtcattgaaggatatttttcaaatatgaggattccaagttcctaccctagagtttctaattttgttgtatttcagtggggctcaggaatctgtgtgtttaaccagcacttaggtgactccagtgcagataattctaatgcaggtcagacccagaacacaccttgagaaacactgctaataaatccttctatggggaagatcactgggaactgatgtaagactgaactatcatatgcatacagggttatatttttaaagtacagcatgtgctactacttcccacagatgtatggattttatgtgtttgaattctacataaccactgtggtctctattggttttggacacagtgcattagtaaacataatattatttaaactttcacactatgagaaaagatttcagtccctttgctataattcagaaataatataaaggtgtatcccatggtgtttcaggtttagaagccattataaaaagccatttgtggtctctgacagtaactttaattaagaacagtgcttcttctctagtggaaattttttggggaaaaaagagaaaatgaaagaaagtgcagctaagttacaaccttcagaggttaatttctcagaatgattttgtttctaagttgatattcatttggggaaattattcatctttcaaaagcagcgtagggtcatactctctcagaaacagagatcagtggttccagagggttctcggagttgactcaaagtgaacaggaagacccttggcaaggctggagctggaggttgctggagtgaggagggtcttgagaggaaaattccctgtgtcacaattttgcctttgtcttcattcagccttctctgggctttgggtgggaaacaagtaggactgactgtttatagggctgccttccgttaacgctgtgaaaagaccagtgaggggctctgattctttttcatctccaacatttaccgtttactttgatgaatccttcttccccactgccccccacactgcctgccgccatgacagtaatggagtgttatgggtaaagactttggagccagacatgtgggtttaaatcttcagttcctcctctataacacggaagtggtaactcattggatttcggtgaaaaactaaatatatgtcaagtccttagcagagtgtccaaaatattgaaaatggctctatgaatgttagctataataaggttaaattataacttaaagtaaaatttgctatatgccattaaatgccacaaaatgtgcaatctttattcaacacatacgtgaggaacacctaccctggccagattgtggagcccaacagtgaattagtcagacatgtccctgccccggaaaacttacattctagggaggaaaacagatattaataaaatactgagcacattttggtaagttaatattctccccagttgataaggaaacacgagctcaaagaagttaaggaacttagcaaaaattcaagccctgtatacagcaaatcagagattagaatacaattctgcctgactccctaattcatatttcatctaccaccatgtggcttcagcaatagaggatttatcttctgtaggtttaaatgccttccccatctctaccaccacgaaagggcctgattgcattctttatactgtgtgtgtaaacaatttctcacagactgggagctgagaaaattaggatttatttaatgtttgggaaatgtaaaggtaaagagaaacctttgattcatgtgatgttttggtttagttgctcaaaccctaaatttaaaaaaaaacaaccacaaaaatcagagactggggaggagcaaaggtcttaaaacattcttcaggtatttttagttacagctcagaaagccataaagaaaaagttataaataaaagtgcttgatcctgcacagtactcatttactaggaagacgctatattatgcaaaagcatacttgaatgctattcagtgaaacaggtagaaataagctttgacatatatcacagcacatggctaaatctggtgtggaaaaaccccacagcattgccatcacaatgaaataaattattctttttattttttcagttttcctgatttaagccttatagttgtttctgtgaagttttacaactttcttctgcaaccaacccttctaaggaagttgaggatttcttctctctgtttttccctcatcatcttctaatgataatatagagatcaaaactcaagtggtaaaaaggaggtaagaagagaaagtaggagatgagtagaatatgcgagaatgaactaattaactacatcaaaagggtggggctgaagacactttcattcacccagtcttccaaagctatttgtttgttttttgaaacagaatcttgttctgttgcccaggctggagttcagtggcacgatctcagctcactataacctccacctcccagattcaagcgattcttgtgccttggcctcccgagtagctgggattacaggcatgtaccacaacaccccactaatttttgtatttttaatagagacgggatttcaccaggttggtcaggttggtctcgaactcctgacctcaaatgatcctctcatctcagcctcccaaagtgctggcattacaggcatgagccactgcccggcctccaaagccatttgttttgttttgtttgttttgctaaacaaagagtttagcaaaaaggaccagaatataacagccaaatctaaattttttttaaaaaatactagtaacaaatcaatagctcttattaggaaagtcgataaatgtcagccaggctcacagtgactaggacagagttaatgaacttactgtccatccaaagggtcatccagagccttactgtcctcacactcagctctatatgcgaggtgcttgacagacaacatctggttagttaaaataaataattttaatttcttatagatttaatcagagactgggtctcgctatgttgcccagctgttctcgaactcctggcctcaagtgatcctctcatctcagcctcccaaagtcctgtcattacagagacgagccaccgtacctggctattacttaaatagtaaattcatttggcattgccatttggtgctgatgaccctcttcagagtctccccagtatctgccaagtttccagacaaagtcacaatcacaagggcatactctgaagaggctgtttattcggtacagatcttgtgtatttttaatcacaacaattttccttttataaagaaatctcatttgacctctaaataggccatcatacattttatattttctctgaatttcttcttgggttgggatccgaatagttttcatcaagggtggattgcagtcttcctaggtacatcttttttttttttttttttttttttcagaagagggtttactaattttatcaggttcttaaagaggtctgggaacaaaataaggtttaggattattggttttccagtctctaattcttacctgttacctctaagtccactcactatcttgatccttaactgcttcccctcttggaagcatctttggtccttataggttagtacaggtttttttctagatttctgatcaccaccaatcagaaaatatttataaattatatgctgaaagatctgcagaatcttgcaagctttaaagactatagaatgaaatactcaaatgctgtattcttttctcatgtctgatgaagatacctgtgccatgtattttttaaaatcaaagttaagcctgcgcagttgggttcagtttagctacatgaattgttctaaccctcatgttgaagtcaaatggtttcttcaatgcattttttttctgataaagaataaaatagtgtatattttgtaatacctagaaaagaagttttaaaatgttctcaacacaaagaaatgataaaaatttaaggtttagatatcctaaatgccctgatttgatcattacacattgtatacatgtatgaaagtatcacatgtacaccaaaaatatgtacaattattatttatcaattaaaaatattttttaagaaggcaatgaggtcttcttatttttccttgtagcctcagtattgactatgaccactgagaaagccaaaatccccactcattcacggaatgtgggggtgggaccaaccccccgagaatttccctaatcttcctccaggtgtcagcacaggcccactcatcttccctcccaccccaccccctcctgtccattcataaagtggagggtgatttgtggtctgcctcactgtgattgtagaggaaaacagccatctttgcttgtctctgcactagatttgtttttctaatttctttttacttgaaggtttaccagctgctttattaccagagcgaggcttccttgcagtctcttttctttttcctctccccctctgttcccctcctttttgttcctagagacaatcagtgtctctggtcccagctgccactgctgatttttcattacagtttaatttaaaactgggattggaatggaaatgtctttttgccatttggggtttgtgaggcctgtggttttattgccaaaggcacaaatgttagttactactgtttttccagagtttgctggggagggtgaaggggtataggagagtaggagggaagaaagacagactgacctagtggaagtgggagggaaactggagggggaaatccctctttcggaaggcaactttattctgcgaattgttttgtttgatgttttgaagaatacgagttgggtcacgaggagggagaaatggcgtaggatctccccaaatgtgtatttatgtaggctaaatatttgtcagccctggaaatgagatggctgagggagggacgatcacacagacacaatttggaactagcaccaatgtagagaaaatggttttctttttaagtaatagtaacgtctgtggctgattcacttgaccacagccgtaaatgggaatacccaaggaaggactaaacggtatctaacctcagaggaaacaagctctacatgtttctatgctctcacctaaaaggagacatcaggcatctatctgcactagcttctgtgttctctctccttttatatttcttggactcaagtcctaggatttatttacaagcctccctccagtcgtatcccagtccagctacacaattaatgtttcctataatctcttagaaggttcttagtgaatgattgttttgatcagattaaaactaaacagtctgctaaaattgatgatgtttttacctatctaagtgtaaaattaagaaggaaggacattcttatttgaaagtaatcatgcagcaggcggtggagagaagctgaggcatttgcacaccttgatttcaatatttagcactgacattggaggcagttgtttcctggttggggaggaatctacagaaaccggaatgtcttatctgtcttgctaaaaacaattactgtctctcctcccagcaagaatcccgctcctcctggatacaccagttttggatgtcaaaccgaatgctccattatctctacagatcgcgctgactcttcacactgtggaacatttcaacctcctctccaactggcctcaggcggctgtcggactggtgaacttgtctggggtaaacacatctccctgtcacagagcagcccaaagactcagcgtgctttgcgggtgcttaaggccttgtgctgccagtctgcacattttgtgtgctcttggttaatcgggacattttatccaaaagcacatttcggccaggcttcctctcctgcagactcacccccatccactccttccccacctgtctagggtgttctgtttccctgctgcagggcggagggcagcggtccaggagccccacaatcatccccagtttccaaaactgttgtggttgcctttgcagttcacacggacattctagtggttggaatttgctcacagaagacattctactaataacaggggagatagttctcatttgtctagttcagagttcatagcacacaaagggggaaagaaaataataataatggaaaccgttttaaccccaccagctgccccgcctccatcacaacaacagaaacaagaacaacaacgacaactccctcaccctgtgccctgtgtggttaactccaacacaaccacagcccccgtgccggaagctgtgtgtggctgaacgtcccgatgtgatactgaaatatgtgtagaggaaatgcctcttctgacccctcagtgaagcttgaaacttgaaggagctgattgacatttgaagaaagcagctatttttgtgtgtgtgcaattttcccggatgaagaaaattgtccagctctccctctccgttgctcagccctcccccagaggctacatctcataccaagcagtgggctctaagggcaggtctgcttgtgctgtgaggacacaggtgacgtctttaaggaccttctttcctgctccagtataccacatgttgtggtcagctccctgtaaggcagatattgcagccaccttttctttccaggtttaccaaaataaatgcagggggaactatggatggagcattttttgccctgtttgacaggaaagtggctgtttgatcttcctttgtgctataggaatcttcagaaatctcttggaaaatctcataaacctatgttagtggccacatatgggatccattaactcctcatttctgcttgttcttagcaaatttttgtctggtgacaacataaaaactttggattgtttttgttttgcttcacaccagagagaactctgttgactggctttagttttgagaaaatattcagcaaaaagcagaccgggtttggagtgaaataactaattctaagtaaagcttggtggaacatttggttcatgaggaagtagggggacatttttcttctttgggtttcagggggattccagagttgccagtgttctgggaagacgtctccttttctgatgaaattgaataagaaatccgggctttcttcctatctccaactatgtgtatggtgtgattttggaatagtggagtggtctctcttagtttctcaatgtttgttttctaaatagaggacaaagcagcaacatactcttttgcaagacacgccaatatccttagataaaaaggtgttaaataatgacatcataccagtatttggaactaaaattactcgtgtatgacaaaaaccagattggaggatgttaactcaaagtagacagagagaaatttagaagaaaattggcttttatttttctgttttaagtaattaataaatgaaacacaacaatctgcgctttcacccacaggcagcatcaggggacatcaaacattgcctttgaagtgggcccccagtagggaggaccccactgttcaggctactttatagtggtaatatactgtctggaaaaaacagatgccaagaaattgtgcagattgtatctctgagcatctgaaaccctaaaacttcagggggccaaggaaggtcccagccctttgattttttttctcttaaaaaaaaaaattggcctaaagtattaaattgaaacaggcacttcatttctttccttcatttctcccttcacctcaggagacctacgttaaattccacttagatcacagctagatgtgggtttgatggtctcaagccaccttttaactgtacgttcatcccataaatagaagacgaataaagatgtcaaacttcatccatatgatattctgacacacgtggctctctctgttaaagaggagctcagatgaagatgggctacaatggattctacagagcagagaactgcaacaaaccacagtgaatttgcacacataaacaagagcagtgtggattacaagacggtagttggcagagattcacttgtcaatgtcgttctgaatggatgtttgcagaaggacagcaattgggctggtgaattcagtgtgggccactttcctaaagccatcgtcatcaaactttgtgtttaaatgtctgttttccagggcaagccaagtaaggcctatgcttaaaacaaggtgttttgaaatcagatttagctcttcatgttctgagtaaagatacagggatactaatttggggattatgctattaagatttacacatttatctgtgtcctaactaggcaaagaaccaaatctaacaactggaaagcaagaaatatactgccaaatattggtaatttcttccctggaatactcatggctatttttagtttgttaatgtaaaaagcagtgagatgaaaagtgaagtgatctgtttccagaagaaaaaccggtcaaatcttcattaataattcctgtagaacgctccatgggcctttatctgacagcgtgacaagctgaactaaacaacagagactgtaggaatgtaaaagacataatcttaacaccaaaccttctgaagatttggctgtcattttacattaaaggcaaagggtaaaaacctccattgaacagacagagtttgcagcatgattatagtgctaaaatttagtggggaagaaaaagctgacatcagagttagtaaatggtggtgttgcagggtatcgaacaactaagctttctttgcatgactagctggaggtttttgagtgtgacggatatgacgcaggtatgatgagatgtaatttaatgatttttaggcctggtgacaaatcttcattatcaataaagaccgtgtaacaagtgttgagctataaccattgcataaaaactaactcaagagtctagactctgcttatatttccatatagtgatttatacttcccaatgtctttacatattatagtgtctattgaatcatgacaatgctatggggcagtcagggtaaacattattatgctcttctacaaatgaggagctcagtcagaaatacaaaaggacttgtccagggttaattacctggtaaatatctgggttgagattagatccagtttttctgcctttgtacctgtgcttttgctctctctgtctctctctctctctctccatatatatatatatacacacacacacacacacacacacacacacacatatatatataaaaatacaatatattttaattttatctttattttttagagacagggtcttgctctgttgcctaggctggaatgcagtggtgtgatcatacctcacggcaatcttgaactcctggactcaagcagtcctcaccattcggtctaccaagtagccaggactacaggcatgaaccatcacatccaggcaggttttttttttttttttaatttttattttttatggaggcaggggcttgttatgctgcacgggctggtcttgaactcctggcctcaagtgatcctcctgcctcagactctcagagagctaggatgataactgtgagccatcatgcctggcctcaatatattttaaaaataaaaacaagtgcaagctgcaaaagttgaatagatcagtgtctatccaggcaaagatttcagaaaagagttagagttagcaagaatagatataaaggcaatgagcaagggctatgggagcacatttatgttgcagctcctcaaagttgcaggtcttcttgtccatcatgtgagcaaaattaaggcaggaaattgtctgttattgtggtgtggctacttttcctaagatcacatgataattcataattaatgatacactaacagtaactcacacttctaaagtacttattttatgtcaggctgtattctaagccctgtactgtacatcgattcatttacttcctatggggtaggttttaatattattcccattttattgacaaggaacctataacttcatctgtcagagtttttagctgggaatcattctgcaataaggttaagaggtattatagaagtctgtttgggccagcctttaaaatagtgtacataatatctcaggctgcagagagagagagagagagatgagaggaaagagagaaagaaagatggtgggagtggtgaaggctgggaaggcatctctctctctcctcattctctctctcactttatcaatatttcctgagcacaccctgtcaatgctccctttgttaataacctttcagttctttcagagcaaaggttggcctgcagctttctccccttcctgctgcctgtcaggagaggaaatcgcagctttcagagggacctgacacagggggaactggatagcaccaaggggtcaagggtaagaatgcagggaacagtgagaaatcccagatagtgtccagccggggctaggcaggaaaggctctgtcacatgtgctcctcctgtttgctgtctttggttcctgcaggaaagaaaatcacagcagattttgcgtgaccatggtgcacactcagccatccaaactgctagagaacaatcgagggctttaggggaggcgttatctgagactgtggttttgccaatttcctgtgtataaataagccaggaaatttaactgaaatgatgtggtattggttagataacatagatttatgtaaaattcattatcagatcctattgatctaataacctaagtggcaaatcacactgtgcgtagtggcaatggggtacggaaaacaccttatgagaagagcacattatgaaacctcgctttgcgatcatccagcagattcccttcagtgcatctcagttgaaactgaacttctgaccccattaagaatggggtacaatgcatgcacctttcctccatctatcttggctgcttctgctctgccttgaggacttggcttttgacaagaacacacttcttcacagaggtcagtgtgtcctgatgtcaatctccttcagcacattttgctcagggttcaggtctcccgagttatgaaaggacgatcagatacaggcaacaaaatgacagaccaggaggtcactggttaaagggctggcattgattgttttgctagtgatgtttctaattcccattaactttcactaagaattatgtgtatggagcatgaggaggaggcacgcttattaactgagtgttactctcccactggcagtgaatactaccatttattaatgaagctgcatgctctcaaaacatctaattgtaaagatcatagaattttaaacctagaatgggcattagagatcatttagtcaactccctcactttaaagaagaggaaacaggtcctgggaggctaatcacttactccaggaaggtcatttagttagtggcagagtcagggctccacccataccccacccccacctatgccacactgacaaattaacaagttttaaatagcttctaacactttcggagccagagtgtgaagttcaatctgtactgcatatgggtgcatatggaatttgaggcatatttagtggctagaggctatgggcaggttatcttttaaaaatgcaaattgctatgtactaaataaaatgaatgtaagtttgaggaagttcgttcagctggagctaataggcaatagtgttaattagtccaagggaatgggtccagtttccgcaagggccaattagcttcatacaatggggaaaaaaaaagactgtttcctagacttggactgtaccccaaactcagcccgccttgtccctggggaaaccaggtgagagagtgagaatgacacagcacaaattcccctcccctgctggaaaaacaactcaaggcatttctcagtggaatcaccttcctacattcaggacagatgttttggaaaaagttgtattaaggctgaaacatggggcttccttggagcacattttcacacccattctcctcccttctttatgaaatgatggtgacagggatttttactggagttttgcagattagcatcaaagacccagagaggtaaagttatattttttcacccagacgcaggcagtgagagagagcattggttcaggagctggacccaagtcactcggacttttcattgaactagatacagcttaccataggcacagagctaccgctttcccaacacaaagaggaaaaatgaaggcattctgagctgcattgatgtactgggtgtttgcccagctagaaagcctgtttcttctccgtgactgggccaaaaataaaaaaaaagaaacacgtggtcacaattcaactgcagttttccttggcaaaatataaacaggcccaaatgagaagtctcctgtagtgctgcctgaaacggccctggccctatttcatgagtccaaaatcagcgacacattgatgaggatgggggaggaaagagtgagcacagcagagaaaggaaactttaaaatacacaagtgaaggcacagcacatacaacttccatgtctgtctggccctttttggttaattattgcttatttcaggccatgactgtttgtacaatggtgacctagtttatccagattggctttatcctttacagaaataactaaaaatttgtcagtatcaaatgtaaagcagtcaaaaagaggcacccagtgtctacagatattaagtggagccaagcaactaagtcataaccttagacactttacaatgttctcccagataaagcagattttaagcaccataactgagattgctcctcattttaactatattgtcttttgacaacatgaacacattaactattgttcaaaaagatttttatacatcactacacaattcagccagcacttagattgaattctatttaatccaagaattcctgaccataatgcagagagtttgggcagcttctcttttactcttacctaaggtattttattaaatgcttatggtttccgtgaaacttatgttcataactgaacagaaagcagccaagacaagcaagaatagcttctcaatggacattctttttcctggcatctcatatccatttgggtgggagttcaacaacaggctagcaagtttttctctttgggcccgtaccagaggcctgatctcatctgattgttcagtgctagcatggtgaggttgggaattataattgagaacctactgacaatcaggttattgtttgatctaagctgagatggtaatagaaaggtcaaagttgttggaaggggtgcaggtatcatttggtctagccctcaattctttccagtctctcttccatacctctatttataggaaatgcacttttccgtgaggaagcccattctagttttggccacttctaattgtgataaagttgttctttaaaataagtgaaacaggaaattttccgtgaccccttggggcacctcgcttactcagcctgctgcagttaacccctcacgggagggggagcactcaggtgagtgggtgcaggagccaggacaagtgtttctgggcactggcaggagcagaactctgtgcagcctcacagcagcttctggagccccagagggcatacgttacagtgctcttttagctttgccatccatggatagcttaagtgttaaacaactcaactgcccacatccgtggctcccaagctcttgtttggtgtccaagaagaatcaggtcacatgaacgaattggagagtagtgaatacagaggattttattgctgatgaaagtggctttcagtgggaaggggagctggaaagggggtggagcaggcaggtggtcttcccctggagtctggccatccctgaccaggctcttctccaaagtcccaccgtcaagccatccttctgaagtcaagctgcttctctctgacgtctggctgcttctcttctctccttctctgctgctcctctgccagtggagcctggggtttttatgggtatgggatgggggacggggtgggccagggtggttttggaaaaggcaacatttgagtgggaaaatggggatgttctcactttgggccacggttctaggcttgagggtggggcttcaccagggaccccttccttttctgcctagaatttctctgcctcctgttcccatcataaggagatactggcttcttatgtaactttgaaccactggtcctggtctgccccctagaaccaaaaaacacaagttcaatccctgttctatcttatagatattatgtattaaaatccagctatctttaacttatgaatttattcagtttgcagcttatagtgtctatagtgtcttattcaaagttgaatagacctgtatcttcccataaggagtcttcagtccatttgtgttcatgtctcttcttcaatctaaaatctctcagttctctcaactttttacaaaacacagaaacttctgtaatttggttctcctcctctagacttcacaaggaaaatattattactaatgatagttattgaggatccactgcaaatttggtcctggactgggttctataataatcctaactattctgcaaggttagtattaggtgagtattagtcctaactatcctgcaaggcctgtattagccacgaggaactgcgtggctcataaagtaagtgatcttggttcacacagctagtatgcgctaggtgggctatctgaacaaacgttgacccccaaacctccagtttgagactgtgtgtgtgtgtgtatgtgtgtgtgtgtgtttaaggggtagcaactggaattgaagatagtgcattgtctctaccttgttcatagtagagaagaccatctcccttatatatgaaagcaaatagctcttagtggtaacactttcttttgggtacttcactacatcacataaaatatagtaaagtacattgatatcccacatgaaatgtatttcttatcataaaatttttgaaaggattttaaaacaatcttttgaaaaaaattttatcaagagtgactcagttaatttatgattggcaatgatttcttggcaggcatcgtgcatactcagaaattcttataaaatgagaaaatctaacctacaaattgttttcaaatgtaatgaaatttttatgaacactaaatataacaaataatgaagttgacatcatgttacattttgtagatgtttaattaaacattaatttcaatctatcagttttatattttagaaacggtaaatcttttgaggtcttaaaacatttttataagcctttgaaaggaacacaggctgtaagtgctgtgtggtaagagactaaataacactgagtctttcacattatttggctgagacagaaaagccactacatccatggtgtggcttaagacggtgaccactgcttcttttggaggccatattattgactttccttttcctcctgtggccctgtcagcctatcttcctcattctggaaactggataaaagggtcctctattggacaaagtttcgtgggtctttcagcttctctttgctactggaaaggggtccccattcagaccccagaagagggttcttggatcttgcacaagaaagaattcggggcgagtccatagaataaagtgaatgcaagtttattaagaaagaaaaggaataaaagaatggctattccataggcagagcagccctgagggctgctggttgcccatttttatggttatttctttattatatgctaaacaacgggtggattattcatgccttccctttttagatcatataagataaattcctgatgttgtcatggcatttgtaaactgtcatggaactgttgggaatgtagcagtgaggatgaccagaggccagtctcatcaacatcttggatttggtgggttttagctggcttctttactgcaacctgttttatcagcattttttttttttttgagacagagtcttgctctgtcgcccaggctggagtgcagtggcatgatctcagctcactgcagcctctgcctcctgggttccagtgattctcctgcctcagcctcctgggtagctgggattataggcacatgccaccacgcctggctaatttttgtatttttggtagagatggggtttcaccaagttgcctaggctggtcttgaactcctgacctcaggtgatctgcgagccttggcctcccaaagtgctgggattacaggcatgagccattgtgcccgtccagtaaggtctttatgacctgtatcttgtgtcaacctcctatttcatcctgtgactaagaatgccttaacctcctgggaatgcagtcaagcaggtctcagccttattttacccagcccaattcaagatggagttgctcttgttcaaacgcctctgacaccttgattacctctatctttgtctttcttggtcagcgcccccaatccatgctgacttgttcctttacttctaatcttggttgaaaagtcaccctggtgtatctggtttcatgagttgccaccaaggggctgcacaatgcaacctgaaagtgagagcgacctcatttcaatcttgcccagtaggaaacaagagaaagcaaagagccagataaattccccatcccttctcccttcttgcttctcttctggagaagtcctgtttgacttctgaagcagggccaatgtagaaatgcataacattgtgtattccttttccttatatccctttttccttcactcccaaacaccctgggtttttgtactttaattcttgcctctagctttaccttctagagaacccagttgagagaaagctaagcaccaagttgtcattcacagattttgcatcaagtagctttccttgacctgttctttaaactgtgtcctggctgcctctgtagccactgacttttgcttttggttctcctgttggtttttattttcagctcatccttgaatattacattccataaggtagatctagaaaatattgaacttcctattgactacacagactgctaagcctaggccactcttgccttgcctatgtacatttagatttgctagcacaattgcaagaccttttatttgttcctgttaaatctgatcagtttagtcagctcattattgctatcacctgtcaaaaacatttagactccagatatagtcattttccatattcctcaacagtcatccacaaatttgatgagccttttcatttttccttcattcatttatgttagtttatacaagccatggtggatgagagaaacagagaacctgtagaaatcttcaaagccctcattctcagcttttaagcatatttgtttgtttactaattcaattgtcctttgcctacaggtaactcaatggcattctacaaacatgcattcaatgagtgcctagttgtgtctatgtgtctcttgttgggacacaaagataaaggagatgttaaagaatttttattggtgaggatttcttttctttaaaggaagataggtctgtggtagagatattgccaaataaacctgccgtttggccacccctcaaatcacatggagtcggtagctacctgcatcttctccatgaaacgctgactctcatcaagaaaaaagagatgcagtttaagaatgctctaagaaattagataaactagtgaaagaatcactttctcccgctgaaaattgagtttacaaaaaaggtgtgaatttagaaactaaaatagcctccttcctaagcacctactggtgtcgatgaaaattctttgccaattcacaaagtcctatcatggttgcaaattactctgtcacaataattgttccctgttaacttttcaggcaagagtgagaggtttgttgaatggcaagaagagcatctggcatttctggtttcatatctggaatttcagcaaatgtcaaatacacatttattataagaaaaaaggaaaaaatcaatggggaaagaaaacttaaagagagcaaaaccattggaaaataatagtacctatgtactctcaggagtatgtcagaacttttcttaaattcatcgttagcatttaaaaatgaactttaatcatactctgagacaggtatttcttctaaggaattggtgcaaactgccatgagtagtagaaacaggaagaaatacaaatctctgaaaacaaatgagaaataaaacacatagattcaatcacctagataatttagatactatggtgaaacacatggagagaaacacaagccaagacatactgcgacacacaagtaagtcaatggtgacagtcaaggcagcaggtgaatcaattccaaagagtgccattggttagagtttaccaggagaccaactgagccggatgggaggaagtttgctgttgttttttgttttgttttgtttttgtcatttaaagggctctaagcttccagctgagcctctctccccttttatttgtctctttcctcttacttcaatgggttcagtcttatagaatattgctaatttgaatacttgttagaagcaggaaacctgagctacacagggctcattaggaatctgttagacatggaaagctcgagttcacctgatgctgtcttggatcatgacagatctgagctggagagaccagcctaagtcagacctggggcaggtggaggaggttgtgtatctggtctgggcagctgtctagtagcctcctggctgtggcctcccgggtggcagcctggcagcatttgccaccacagggaaccgaaggcgaggggaagaggaaaaattacagtttgcaactcaaataaatccccaaggatttatgacttaatcttagtgcagtatcactgaaagaaacacaatccagttaactgaaagtaatttaaaaagcaattttaatctttacttgttctctcaaggaacattaaaagggatccaattcataatctacagcaatatgtgggaaaatcccctttcttctccctttcaattcttttacacacacaaccccccatacacggggtttccagagcttctctttccctgaacccctcactcaaccctccagcctccgtaactcccagaaacaacacctgcacagactctttcttctttccctggggccaccaaaacacacctgtctgtgcggttctaagaatgctggagaccctgcaattccctctgaaggcagcacaaagaccccacttcccactcaggtctctcaccgactctccctgctctttttgttcctttgtagcatttccagataaaatacaggacatccatttcaacttgaattttagataaatgatgaataattttttagtataagtatgtcaaagtaacatgtcttatatttttattttctaaatctggcacccatatcatttttgagattattattcaccaaaacattttttttcacttaaagagaaacaacacacttttgaaaggatacttttagaagtatttggtaggaaactgaaatggcctggaatttccactaagtgagacagggaatagtattgtttgctgttattgtggagctgagccacttcatccagcttcccccattagaaaatgcttggccaacattaatttacatgtataaattaaatatgtttacatactttcgtctagaagtttagaatctgcctaccttagtacttagtatacaatagatggtacaaaatagatctttttgagtgtaattaaaagatgcctgtgttatctaaaaaaaaaagtaccccaaacacatatggatacaatcagttccatgttaaattttatgagactgtgagttttgtcttaatataataccgatgtatttattctaaagatgttgcgccaaacatattggagtcctctcaagccgcttccagacctctttatgggccacacacaagaatcactcttcttgctttatggtctctctttgatttgtccttagactgtatgacccagctggatctcccgcttcacccaccctgcttggttctaaatgacttttggctatctccaaaaggttacatctatcctctaaggatgaagattcacaaccattgagaatacactgacatctcaattagcggatcccctgagagcaaagctctttcataataaaatgcccgtattaaaaatgagattaactccttataaatcatacacaatggagtgggccggtatactaaatgcacaaaaatgccttctgaaagagcttatctttgcctctgttcagctcaaagcaaaaaagtactgattctactccaaactgcaagtcaacttgctcccccgctctctgttgagtacctttctgcacccctgactcagtggcaatcccctcctctccaacttagcatacctcatgccttctccacactttaagactgtgaagaattgacactcatcgattcattacctgattatactttactggaaattcattgattcaaaaatacttattgaaagtaagtttcagtcaatgtattactttaaccaacaacttgacatatggttggtattaaaatctttgttcctggatacaggagagccaagagtcattaggtggatatattttaggagatgagagtgcatctgaaattactgtctgctactgagtgagcatccagatttaggagggcaaagagagaggggccaagtattatcttttatattcaaatgattcctgttgttttgcagagaaagtggaggttggcccaggttaaggttgctggaagtctatttctcagagcaactgggtgtagagcagcctgtgagagaccttataattatattctctgaggacttcccctaccactctttaaggttgaagaaagtaaatccaacagggtggaaggcaaaatgaagaaagcatatagattttggtaaatttgcctttcattagtaaaaacgacaaggcagtgtctggttcttcaaatccagtaaagttttcttcctaatttacatcctgacatcattaaaggcaaccatataataccttaatatcagtacagtatattcatactcttttaaatatttcttaaccaaatttggaacaatgacctggaagattcagtatgtaattaccttgattttttttcttttataaaagtaaacttctagctggcatattgctgagaacatccagcatttaaaggttctggaaagtgacatatgggggtgatggtagatgcttaaatatggttgatttttctacattcagggagaagtggaggtgttcctgccttattcatgcctctctctaggccgtaaaagcagaaataagcaaaatgatgatgcattgtgatgatgaataataataatgcaaaatagcaatacctgtcttcagattgtgaaagcagtttcttagcctttttgtatgcagatgaagaggtggatttttatagcaaatctgccttcagacctaaatgccctcctacaccacacacccgtttccaaacacaggctcacacttgggaattgagagggtgacttaaaaatcaggatgtcagaaatgggacaaaactggttttgtaccaaaaaaatttcctgatcattttgatgggacatatttatataattgttcataacaggcattttttgagtgtgaaaaatgacctgtattgaaattgtagaaaacagaacaactggtcataaatgactatttcctgatgaatagaaatgagatagaaatgaaaaagcacacatctatgaacagaatgaatgacaacatctttatcctgaaggcaagaaagaaatgacaatgctcgaatatcagttatacatcaggtttctgcaaaatcttaattttcattcagttccaagccacttgttaattcaggtctctttagaacttctaggagatatattctgtaccaacttcttcaaaagttctctcttttctgatgtattggaatagtttgaaggtggctgagaaaaatatcttgtccttcgtagttattggttcaaaatttctttctctgatggtttcatctataggatttctaatttttgcctccaaagaaattgcattcaattggaaactgtgatcttatgcttaataaacaagagaacaccctgaagatgattctagaaaattccagcaggtatgaaaattatcatcaaggtggtaggattttggatcaaggtggcaggattttggatcaaagtggcactatttagactttttaattgatattcaaaacaacgagaaaaaatttctgtgggccttgtggctaaattgaccttccgattttagaactgtaaaatatgctgagagatgatatctgatacaatgactacactaaaaaagaagctttgtaagttaataactgactttaattctaaataggtctctaaagaaaggaaggaacggttgaagggtacattccctgtagactggggattataacatttttttctaaggaaaaagtactaaagttttaaatatagattttagacatgctaatatttgttctaggaagaggatgggtgaacttgaattgaaataataccagaagcaagaagaccaaaaaggcagcataatgagaagtaagatagttttgaagaaattagacaaaactgcaagagaacttgtttaaggattcaaggaaaaagtatacagaccagcaaaaaaagtgaggaggctg

SEQ ID NO: 2 - DNA, 50253 bp, Homo sapiens
tatcctttttatctgattacaggaaaggcagactacaagttactgagcacctccctgagaaaattgaaagtagtttacaggaagatgaacctgagaatgatgctaagaaaattgaagcactgctaaaccttcctagaaacccttcagtaatagataaacaagacaaggactgaaagtgctctgaacttgaaactcactggagagctgaagggagctgccatgtccgatgaatgccaacagacaggccactctttggtcagcctgctgacaaatttaagtgctggtacctgtggtggcagtggcttgctcttgtctttttcttttctttttaactaagaatggggctgttgtactctcactttacttatccttaaatttaaatacatacttatgtttgtattaatctatcaatatatgcatacatgaatatatccacccacctagattttaagcagtaaataaaacatttcgcaaaagattaaagttgaattttacagttcgtatattcatgtggtcctttgaaagggtattctagaaatcactggaaagaggagaggaaagaaccaggtaggcaaatggtctgtgaaacccttgggtcctggaagcagtgtgagtgtaaatgtgtagtgtttggtttcatctaaataaacaaagatgatttctttgacacttgaaataaaatacaaattcaacaaaaagtagatcagcattattaaagaaacggttcaactttgtttcttcccttagtattgctgacaaagtatctgctgtagaatacaggaattacttagaatagaaacatagtcatcacaactgttactaaatggaaaagaaaagaattattgagttaagtattcctgtcaatacgggaaacactgctagtaccttatgttggtgttagacctctctgccctacactgagaatatagttttacacaggagcaaggtttgtgaagcagcatagtgaggtagctaaagccatgggctggctctaaaggctttaaatcccagccatgtggcttagctgccatgagatgtgcatttgagaaatgttgtcttcttttgctgttcaactccagattttcagatgataatgtgattatcccagcttaagttgcgtccacttctggtctagtgaattgtggaaggcagttttagagaaaggagtcatgagtaacatgaacagcagttggctatgtctttccagttctctgctgatgtcagaaagacccagaaataccaaggagaaaaagccatcttagggatctaaggaggccctatggaaagttactaccttagacatttgaagatagcttactgcttagtacatacactgtaaacaacgatctcattttaaatgagaactttctcataaatattttacaaatgaggtcaaactagcataaagccatttaaagagattatcagtccaatatgaaccagttaagtctttggactatccctttcctccttgactactgctttgacgtacctaaatcattcgtcttacatgtcagaggaaattagttttggatagttctcctttctgctgtacctcatgggggagtgagagagcagcaatagagaacacaatgaaaaaaatggaatactgggtaaacaccaataatatttccattagtctcctaaagatgttcatgccatacttcctatgcattacattgggcttttgtaaacagcagcataaaatcttctactctgacattaggaaatcagatagtctctgaagttgacctgttattggacaaattctacttccagcagcactttgcctgacatatatatgtatataccagttaacaggccacagtcaaactgataaagggaaagagcaccagagttaggaaatctgggttctggcgctggcctttataattcgggtcacctccctgggcctcagtgcctttgtcattaataacactggtattctctaaagtcccttccagaactcaagaattctgcatttcaaaacaccttgatcaaggtcaccagagctacttctgtgcccaccatattcctctagacacttcctgcaaagcaactgaagtgaagaagcacctaagagcagatacgtaaagggcaaggtggggtaatcttgtccatctgaggaagttcccagaagaggtcaattgcaaatggaggtgggacctgagaaaacaaagaaatgattacatcaaaccctatattggcaaaggaggaaaacatcttaaatttatttatatattaaattatacatatataatttttaaattatatatgtatatatgtatatataatttaattatatatgtatatatatatattttaaatataagatcttaattttaatctcttaatttacattttaatctcaagatcaagggtattcccagcttgtacacagtaaccttgatagctgaagaatatgaagggaaagctgaattatgagagaacttaaaactactctggcaatttttgtcacatgaaatatcgatcaggcaaatgtttagttattaccagctattaccaaacgaccaaatgcttgatcaagccactcttctatgtgtggggctctcaggcatggttgcttttctcaataaacctacatacagtccagtaaaggatagaaggaagatgtggtacatgaaaatcaacctatgctggtggtatgagatgtgctatagaggtggaactgcttgagctagacaagatgaccacagaaggccttgtgtagaagattgggtacacggcttcattttgaagtatcagcagactgagcagaagactttttagatagaaagtcaagaaaattgtagataatgacagaactgagccagagcaacatcctggaaaagacattctgaggagtgagcaagcattcagtggaaatgaaaaaacaggataggaagttgagacactgccttgggggaaaatatgtgtaggctgccaggttgtagggaaaggagcctgaacttgatgtccagtttgaatcttggttttattcttcatctgtatgaccgtacctcaagcaaatctcttaacctctgggagcctctggtttctctcccataacatggaaatagatcttgctcatagagatttttataagactaagatgaaatagtgtttttgcaaaacaacctgttgtataagcgtcaggtattatttttcatttttctttatatttccccctcctgcccaggacaattcttgctttcctttatttttaaagataattttgtagactaattcctatactggtgttactctaaccttcacaagtcaaagctgaactgtttagggaggcttataactacctgggacctgatatcagtctcttggattctaatgtcccatgtaagtttctcttgcatgaaaatacctggggatttgtgactcactaaagctagtgctgtgttaggctctcttaacaggatggacattccagaccccagataataattatctcattgtatgtagagtcattaagaccaaatctaaagtcttgggttccgtttaccccattcatgtgaggcactggaaaccatgccatgtgaggaacaattgacagaactcaagggtatttagactgaagagatcagctggaatgtggaaagttaaaaagctttgaagctttttctgtaggcagtggggtctcttctgagtttttgagtgggaaaatgacatgacagagtaattctttgtgaaatttggctccatgattcgtcagtaggatgagtctgttagtaagaggcagagaaaccaatgaaaatgttaccgtgttaatacaaagtgaccccaacccatgtccatcaatactgagagatagagggaaaaatgaatgatcagaataagaagttaccacaggaatattcaagatgaactcaaattagtgtttaatagataatgaattggctgacaagacaattcaagatggcagaatggaaacatggcaaaagaagaggttacattaagcaaattgcatatggggagaaaggagagggatgccagccatcttgtaactgttcagcttaatctgaaagaggtttttaagaaggtgaggtagtgggtaaaacagcttaaatttgttaagggaagaatgcctcatgatccccacgatccatgtatcccagaagagatgacggaggctaccttcagatcttttcagccccttgcttctgcggacactgttatacagggcgtacactttcccttctcaatctctcattcctccttctctctctgcatcttggggcaaagccttggagacaagaacaaacaataaaaatgataagtaagtttcccttgaattgtgcccatatgttaatatttactttagcaaggcttcagactggcttagaactggagcagttgttcttataccaggggtgatttacaatgctccctctttacctctttgccaaggggacatttggcaatgcttggggatatttttgattgtcgcaacgggcaaggggtgctactggcatgtagtgagtagaggctaaggaagctgctaaacatcctacagtgcacagaacagcactccaaaacaaagaattatcttgcccaaaatgccaataatgttgaggatgagagcccctgaattaaaggggtaacactggatagttggtattagaaacatccttgagcccaccagacctctttatcctacccttgggataagttgttaacagcacatactctctaaagaattcactgagctttgggtttttttggtgctaaagcctgggaaaatcagcagatgttgatcttccgattttatttgatcagtgtacatgatttctactcaaagaagggttggtaccccttcatagtgattatggccttatttcggaccatagaactagcagttcctcttcatttaatcatagagattgagggcagcatatgtctaacacccaaagtgtaaattcatagggtaaaatatcttagaaatctcttctttcatcagccactcctgatctttcatccaaaaatgtattctaaagaactgagaaaatggacattttccagacacctatgtgtgtggcactctactaggcactggaattccaaagacaagaagtcccagcactttgggaagccaaggcaggcggatcacgaggtcaggagatcaagaccatcctggccaacatggtgaaaccccgtctctactaaaaatacaaaaaaaaattagtcaggcgtggcagcacgcacctgtagtcccagctactcaggaggctgaggccggataattgcttgaacctgggaggcggaggtgcagtgagctgagatcggggcatacactccagcctgggtggcagagtgagactccatctcaaaaaaaaaaaagaactaagaattggtttgtgttttgagatggagtctcactctgtcacccaggctggagtgcaatggcatgatcttggctcactgcagtctccgcctcctgggttcctgggttcaagcaattctcctgcttcagcctcctgagtagctaggactacaggtgcacgccaccatgcctggctaatttttgtatttttagtagagacagagtttcaccatgttggccaggccggtctcgaactcctgaccttaagtgatccacctgccttggcctcccaaagtgctgggattacaggcatgagccaccccacccagcccaagaactgagaattggtgagatcacctgtagccatgtagtttctcaactgtattagtgcatcttgccctcctccaagaaaatgattcttggcaccaaaatttgtcaatttgccttttctctaactccaaatcaaaattagaatatcagcaggatggtggccatggaagttggaattcactaaggagtgtgtaacaactcacctgccaaatcgactagcccttaaaaaaaaattagaatatcatttagcatcagaaacgttttcaaattagttagcaaaccccagtctccaaaaatatataaagtcagggaaaaaataaacagactaaactagaatgtgtcttgagggcagtgacttcttgtcattgtaattccagtgcctagtagagtgccacacacgtaggaggtgtccggaaaatgtccagtgaatgaacagaacttgttgagacaagtaaaggagatgctcatgtttccataggcttgctgtaaacatgagaagcgaataggctaaaacctcagagagatgccgaaccatggtaataaagtttgatcttccagaattgagatcaggatgatggtatgatagtacttacagtaggtcaggcagcatatcacaaaaattccatttactgagattaaggtaatggcccaggatgggagcaggttatcaggaaaatgctcttgcttggctatggagggaaaagaataatgtcagctgtaatgtatttcctactgcctgatactcattctgtgccttttctattgatgcaactgtggagtattctttgcctggtcagctctccagtatgcagctgctagcatttttcttgcataattcttcaatcaggcacatacttgtgggcaactaatagtcagatgtcacatattaaaagtgaaaaagatactttgaatgtctgcatttactgagttaagttgacataaggaagattctaaggaaatcttttacaagccatcttgcagtatctcacttttatagctgattataactatgtgttactactaactggttgatgttgtgttctaggtatactttatttttccttctctagctctgtcgtgccttctccctttctcctaccatattctctctcaacacatacacatcacacacacccttacctcacagtagctgccctaaagctacaggagccactttgcattcactttcggatacaggtttttcaccctctagctactggaaacacagaacaagtctggcaaagaactaagtgtggatatggcttggtattaggtgggaccatcctagaagagagcactgaaggttatcagctgtagtttcagtcccacagagagcacaagaagtacacaaggaaatgagggtggggaggagaaaggtgttggtggatatggtgctgcgggtccatccctccagatcaggagcagcagctgcagtatttattcttcagctgctttgaggaatcattagcaacatctggaaaaacggcagggacacaaattatagcagctcattttctggtttctctgaaatggcttacaaataaatgaatatttactaacttattgtttttactttttttcttcatgctgaagttttatttaaaacataaaagaaatgttcccccaaaatgctagtgaataaagcaaaaggatacgacacagtgctctctcactatgagttagccagcctatccaagtacagggtaatatacagtactcaatgctggtagaatttcacagtagtttagtgttaaagattatctgtgcctagattatgaagagattctcaatgtgtgatgcttagttctgggtttacaccttactgggcatgaacaagagcccctgctccttggccatagccaaatcccttgggcccaaagttctttgcatagcaccattacaatagatttcaccttctttttcagtcagagttgttgattcaagactcttcccacactttgcacatcagaaacagtttttgtgccagggctttccagctccaattatcttctcggcagcatatacagaatccccacatctggaacatttctcagcacctccatatttctgagcaaatttagaagcatttggatttcttgtaggcctgtgaggctgaacactctctggcttgatgcccagcctctcgccatgttaagcgtgccagcaccctggccataaccatagccttttgtcccatatttctttccatagtaggatttgcagtagatctcttcattgtgaattgccactgttgtgctatctaaatttttcctgcaaaccattgagtcggaggcaggagcatgcaccacaggcggagctagcaaggctgggctggagagagggtccagggagtccaagatccctgtttttacttttctgattaccaaacccagtggtaagttttatttatttatttatttatttatttaagacggactttcactgtgtttcccaggccaggctggagtgcagtgatgtgatctcagctcactgcaatctctgcctcccgagttcaaggaattctcctgcctcagcctcccgagtagctgggattacaggggcgtgccaccacacccagctaatttttgtattttcagtagagatggggtttccccatgttggccagactggtctcgaactcctgacctcaggtgattctcctgtcttggcctcccacagtgctgggattacaggcatgagccactgcgcctggcctagttttattcttttgcttattggacttctcatcagcatttagccagttggaatcttctccttcttggacttctgtgacaccacatccttctgtttctgtttgttgcactccgttttctctgaaggcttttcttcctcttcttgtcctctaattattgttgttcccatggttctgtttgtggtcccattttgcccttactggccccagtcttcctgggtaatatcctccacacctgagatttgaaatgccatctgaggctgggcacagtggctcacacctgtaattctggcactttgggaggccaaggtgggcagatcacctgaggtcaggagttcgagaccagcctggccaacatagtgaaaccctgtctctactaaaagtacaaaaaattatcggtggcgagtaccaatcccaggtactcaggaggctgaagcaagagaattgcttgaaccagggagacagaggttgcaatgagccaagattgcactccagcctgggtgacagagtgagaatctatctcagaaaaagacaaagaaaaaaaaaaaaaagaagtgccatctgatttctaaatttgtatattggatggatgccagcatctccacctgattaaaactgaatttactacctgctttccaaatcatatctaccagctgtattctcccatttcagtgaataacaataccatttagttacccaaataagagtgtggtattttctttgtgctcacttcccagtaggctcccatgtattttctgttctatattcagaatatctctggaacttactgctttttcccaaatctcttgcagcaactgccttagctgagatttttctcatctcccacctagtagcctgcaaaccggtctctttgcctcaggtttcctaggctctaataactcctgcacattgctgtcacagtaatcattctgaaacacctatttaatcatagtgtacctaccacttaaagacaggatagttggtttttcttttttctctaaaacaccagattgaatggagacatcaagtgattaccagagttgacctctacagattagaatgacacaaaaaataacaagccattgctgttatcctgggagtctagaagtttcacaggcttcagctcattcctggcttccactccacacccatccacaagcctcattcaacctagagagagtatgtgtgtgagggaaagagggaggcctcagtagcagcaagccaggtctattgtgacacctgttagaaacctggtaacatcccacaggggcagacccagaatccaaggtacagagcggtgtgagggcatctgcacatgtagcttattagataccatgagtatgactctctcagatgtatctccttccagtttatcaagggaaaacaaatttggtgagactacactaaaaagaatcatatgcgcaatccgcttaattaatacatttgggctttttttttttttccaaatcagttatttactgatatggtttggctgtgtccccacccaaatctcatcttgaattataactcccacagttgccacatgtcatgggaggaacccagtgggaggtgactgaattatgggggcgagtctttcctgcactgtccttgtgatagttaatgagtctcacgagatctgatagtttaaaaacaggagtttccttataacaagctctctttttggctgctgccatccacataagacatgacttgctcctccttgccttctgccatgatttgtgaggcctccccagccacgtggaactgtgagtctaattaaacctctttattttgtaagttgcccagtctcgggtatgtctttatcagcagcatgaaaagggactaatacattttcacctcaaagctttactcaccctgacctgtaacatttctatgtactatacacttaatgtatatttgttagtgcagtcagcccttgacctcctataaatgcattatttgcttttgaatcttattctaaagaatccccacacagtccaattaatgagatttgagacatttataccctaaagctctccagccacaaagacaaaaaccttaagttagcaaactatagcacatgggccaaacctgtcctgcacctgtttttaaaaatgaaattttgtggctgggtgtagtggctcacacctgtaatcacagcgctttgagaggctgaggcagatggatcacctgagatcaggagttcgagaccagcctgaccaacatggtgaaaccccatctccactaagaaaatacataaattagccagttgtggaggcaggcacctgtaatcccagctacttgggaggctgaggcaggagaatcgtttgaacctgggaggcagaggttgcagtgagccgagaccacaccattgcactccagcctgggcaacaagagtgaaactctgtctcaaaaaaaaaaaaaagaaaaagaaaaaaaaaagaaaaattttgttggaacatagccatgtcattcatttatgtcttgtctgtggctgcttttgtgctacaaccagcagaattgagttgttgcaacagagactgtgactgcaaagcttaaaatatttactatctggctctattcagaaaaaaatttgccaacccctgtcttagaatgtcacatatatccatattccaatataaataatgtccaaatcaaaatgcaatccaagctagtattactgatttaataatcagtactctactgttttctgccttcaatcagaataatgtaaaattggttaaataatgctataacaagaaagtaaaaatagagacttaataaactatatgattgaagcctcattttaataaaatttttacaacacataaaagatgactgagactggtaagtttggagtatcaatagtcatgtcaaagtttggtttatatttgaactaattttcccaggaaattttgtctcattgaggaaaataaagaatctgctgtagccgggcatggtggctcatgcctgtaatctccacactttgggaggctgaggcgggcagatcacctaaggtcgagagttcaagaccagcctgaccaacgtggtgaaactccatctctactaaaaatacaaaaattatctgtgtgtggtggctggcacctgtagtcccagctacacaggaggctgagacaggagaattgcttcaacctgggaggcggaggttacagtgagccaagatcacgccactgcactccagcctgggtgacagagcgagactccgtctcaaaaaaaaaaaaaaaaatctgctgtaacactgaaagatctagagtaaatcatacactagcatgaattactagaccatctaaaataaattatccacttcgcaactacaagtaaagacatgaagaattaagacatgccatatagtatatattgtgctatatacttatgtgcaactgtattatcaaactcagtgttttgtttcttactatacagtcacaaaacctatccttgggagtggggctaggggtagggagagagacctgtggtcctctgtatgatcagccgtacaatttaaacaagtattaatattttgagcatctcagttcaccttgtaagccatcttaagccattataggcctaagatgtatatattcatataaacccatcgttttcattgtatattttcaaatgatttcacctcttggggaaagagaattctctgagtttactaccagtagggtaaaatatttgctccaaaatgacctcttttcaggcgttgtcttcaaggagtttgtcactcacctttcccagacttggttcagaatgaaccagtagttcttaaaaagcacattcgcccacaaaaaaaaattgtttggcaccatggaaccgtgtgggtggcatgccctaaaagaaagcaccaaatccctaagggcagttccaaagggcaaattttaatgctttcaataatactattgttacaaaaactttttaagatgaatgcttgatggataatggtttttagtatatataaattttagaatatttattacaagaaaataaggccgggtgcagtggctcacacctgtaatcccagcactttgggaggctgaggcgggcggatcacgaggtcaggagttcgagaccagcctgaccaacatggtgaaaccccatctccactaaagatagaaaaaattagccgagggtggtggctggcgcctgtaatcccagctattcgggaggctgaggcagaagaattgcttgaacctggaaggtggaggttgcagtgagctgagattgtgccactgcactccagcctgggcaacagggcgagacactgtctcaaaaaaataaataaataaataaaaagaaaattagtaacattatcacaccttgcacagtgactttattttttaaatttattttttaaattattttatttatttcttttagagacagggtctcactctgttgcccaggctggagtctagtggcatgatcatagctcactgcaactttgaacacctgggctcaagtaagccacccaccttaccctcccaagtacctaggactacacatgtgtgtcaccaagcctggctaattttttaaatgttctgtagagtcagagtctcatgcttcccagctggtcttgaactcctgggctcaagtgatcctcccacttcagcctcccaaagtgctgggattacaggcatgagccactgtgcccagtctcacagtgactttaataagtcataatagcacatgtcatttgtatatctaaaaacactataaaacactatcaaaataaatacgacaattctaaaatgtatctggctgagttacagtaatgtgccatgtaacattttcaatggcattctgcatatatgatggtagtcccataaaattataataccgtatttttactgtacctttcctatgtttacatacgcttagatacacaaatacttattgtgttacaactgcctatgtgttcagtatggtaacatgctgtacaggtgtgtagcctcagagcactgggctgtaccatgtagcctaggtgtgcagtaggctgtaccatctaggtttatgtaaatacactctgatgttcagacaatgacagaattgcctaatgatgcatttctcaaaatgtatccacatcattaaatgacacgactatattgtctttttagattcgatatagtagaaactccccagaacaatgtcacttacttgtattccagttgaaggtctgattcactcttaaatgtccatacttgatgagacacatgaagctgtggttggttgtcatattgaaatccagtttgctgctaacagcatagagctcagtttcaggatcttgggaaactgttgtgttgatggcatttaattcttctccattttccaaccaggagaggtgaggctctggaaaacctccagaggttgagcaaattatccttctaatattagaagttggaatttcaaagtcagatatactaggtgtagggaagtcagctaaagaaagaacaagaatatataattacgtatagttacaaacctatgtgtgtagaggtttatttttaaataattttctagctttaataagaattgataaaggccaggtgcagtggctcactcctgtaatcccagcactttgggaggccgaggcaggtggaacacctgaggtcaggagtttgagaccagcctggctaacatggcaaaaccccatctctaccaaaaatacataaattaaccaggcgtggtggcaggcgcctataatcccagctactcgggaggctaaggcaagagaatggcttgaacccagagggtggagattgcagttagccgagatcgtacgacttcactccagcctgggcaaaagagcaaggcttcatctcaaaaacaacaaaacaaaacaagaatgataaaatgagatataatttgcaacttcccattactcattaatagttatgtataatccaaagactaactttgatttgaattggttatatcaattctttgccacttttgatggagataggagggcacttattacagaaaggagaagtaggttcgtgtgaataaatgttgccagagtacttgcaattgtaagagatgaagagaagaataatagacaacgtttactgaactcttgtttgttaggtctggaccttacctcattttgtcctcacagaaaccctagagaggtaggttgtagatctaaaaaggtcaaagatcagtaatttcatatgatttaacctaatataatttccattttataagtaatcaaactgaggtttagagaaattataactaaccagtaatggcagaattcaaatctgtctgacaccagagcctatcttttcttgaccttgcctttctttctttcctttccctttcttctcttctcttcttttcttcctgatgcttgaagtacgcaagtggctttcttctatgttatctatttatttactaaactatagcgaacgcctgaaaacccaccatccaacttgagaccaaaaacactgacagtaacttaggtaaatctgctggtatgatgtcacctatcctgtccctctctttcccttacctaaggtaatcactatcactatcctaaatttgtggttagcatttccttgctttttaaaaggtcgtcttttacatgaggggcctacccctttgctcttgagaatggtttctcatgtcctcctttctggccttatcctttgaacattgactcttaagtctgttacaggtaagggctccatgaagttgtgtttcccttttctttctggctacctaaactcaatacataaatagagaaggctttgcctaacatagaactttcgttggaaagggtctagatggggagagagaaaacataaatctggtcaaggagaggagatcttggagaaaggaaaatgctgcctaatttacaaacctgtgacctgccttttgagggggcattgtgtgcgtgtgagtggggggcaggcattgaactatagtcatgagcttttgcttctactgagtctcaccaacaccccataccccaaaaaaacacccatgaccagtattttttaatttgcatatttatttctggatgggttttcccctctttattctgtcctcatgagaccatgggcaaagctctttattttaggtgagaagaaaaactctgaaccacatcagtaatgttttcatttgaaaatatcattgaaatgtatttgaataaatttatttgaattcatttgaattttttaattattttgatagtagacatgctgtttatttatttaatgtgcatatggaagcctgaaaaatagaaagctgtatagactgagtttagttgttaattggtttgggagtcttccatgcataatttatgacttcttggtgttctatatatttgtccgaattaattactgggatgaagctatgctagctttcaaacaggagatgcctttcagaaatttgtatattgtgcagttgccagaccaattaaatacctggttgaaattaaaaaaaaaaaaagtagtcttttactcagaaaaacctatatccaaactacaacattgagcctataacctcattcaccacactttattgtttttcttactattttgatatgccttaaagggacaggaaggccttcctagcattcctccaagacccttgaggcactgtttcatttatatatttgatccccataagattctgaagtacaaagtacaggaaaataaatgcagagaacataggagaaagatacctagcggcttcgtcacttattcttacacataaagagattagcttcttagcatgaatgtagggattcaatctcctcatagagttagctttcttttcagaattctgagccccacagagatgtcatgtagcatatggtcatcaaaagcaggttttaaaaccagttctgccttgtgaccctgggtcaataacttacccacctttagtcttagtttgctcatctataagatagggacactaatacccagggttgtaagaattaaatgacatcgttcatagaaatcacttagcacagagcctgacacacaggaaactaaatagtctcactctgttgcccaggctggagtgcagtggcaccatcttggcttactgcaacctccgggttcaagtgattctcctgcctcagcctccagagtagctgggactacaggagcccaccactaccatctaatttcttgtatttttaatagagatggggtttcactgtgttagccaggatggtctcagtctcctgacctcgtgatccaccagcctcggcctcccaaagtgctgggattacaggcgtgagccaccacacccagccaatgatagctatatttaagtgggtcttgaatttatcctctcttaggtaagccccctcatttaaatcaggttgccaggcaaacacttccaggaatgccttgtggcacctacaataatgaggataaagggaagccatgacaaatgatgataattgccaggaaagaggaaaagttggatttggttggaggtgaagttaccttttttttttgtttgtttcaatgaaccctgtccctaaatgaagtttgatatgttcctgagccacttttagttggcattgttatttcccacttattaatttatcctataagatcgactcatgacacaggcagctgatatctagaatattctgtgtttcttataacatcaatatgttttgtgttataactaggaataataaatccaaaaactcatatcctaaattattaatatgattcatgttcatttctgtgctctgcttttctgggaaataaactacaggaatgccactcataccaggaactgtattaaaaatcttttcaaggccaggtgtgctggctcatgcctgtaatcctagcactttgggaggtcaaggcaggaggatcgcttgaggtcaggagtttgagaccaccctggacaacatagtgaaaccttgtctctactaaaaataaaaaattagccaggcatgatggcacatgcctgtagtcccagctagtttggaggctgagacaggagaatcgcttgaacccaggaggcagaggctgcagagacccgagatcacgccactgcactctagcctgggtgacagagtaagagactccatctcaaaaaaaaaaaaagtttcaaaatctttcttggcttagaacagcctaaactccatctcccaccttttttctaaggtgatctgtttagggtaactactcctgaggtcttgtgagattgtgaacaatcaaagacgttgtaagactgtaacctttgtatctcattttaattagttaacccaatttttaccactcttaataggaaagggtaggaatgtcttacaaggaaaggaataggtgcacatgttttaggaggaaaaatccattaacctagttaagctgttaacgaatgtagctagttctcaaacatgccagttaatggaggttttcatatggctatgctgatattatattaccattttgcaatcttagacaaatatagggtaaccaacgtgtcctatttgcctgagactttcccagttttagcaccaaaaatcttgtgccccaaataaaccctttggttctgagcaaagaggatacctggtcactctagccaaatgagagcttaattccttgcttctcaaattgtggtcctccacagcagcacaggcatcacctgagagcttgttagaggtgcagaatctcagatccaaaccccagacctactgaacttaaatctgcatttttaacaagaccctcaaatgactcataggcttataagcatttgagaaacactgctttgactcaattggaaaattcagaatgcttctcagcaaaattaagcgagtgacctttttgtcttccctttactggattttgtccacccacacaccctcggttctgagtaccccagaaatctcacattgtccccttagctgtccttggtctcttacggtaatctgctaatagggcctgccccccttgaaatgtttccttttctcactcttggattttcttctttatctttctatccaaattcacctgacctgagtctacttctctctcggtagtccattagaggactacgtacctaatgtaattaactaatacaggctaatatatttgtggtgccaccccccaccccccaccccaggaaacacattttcattttaacagggatcttttaggaggaaaatggagaaactagcaggaatggctatgatgatgagaatttcaggagtcaatgcaggtgaaaatcgtggaagaggtaggcttcttagtacccctcaaatcacatcaccatataataatttattctatccaagagcagagaaaacactgagtgaagtttaagatagttccatgtaactttggcttactccccacaactttaggtgtgatctggatgtcacaagtaaagattcatagctaatgattaaaacaaagaacagtaaggaattcactacggatctgctgaagttatctattatcaaggttaatcattatgttttattaagtaagaagtttggttttcactagaggctcaagtcccaggggaaaaagaaatatgttcaaatttcaactgtgagaaaatggctcagggatataatttctcaaaaagggctctggctccttcagtatcctctgttatactgtaattaaagtgaaaccccctttgcaaaattatgactgagacagtgaaagagatctaacttaactgactccatcttgcttctaacctccaagctatctttgttcactcctgggtgtaggctgaactaactttggtagaaacttagtttatagtttatagtttaaacaaagatggtaacagccctttcccaaagcagacctccttcttgcctggggagtagattgcctttgtaggactaacattagccacaagattagaaattatggtttaggagtcataaagctggatgctatgagattctgaccctccctaaactgctcctaagatcagtgcttgagctattttgcagcccctgcacttgatggatcagctggcaccacccagatcaataaactgactcatctgatcttgtggccccccaacccagtgcaagaagacagcttcaactccctatggtatcatccctgaccaatcagcactcccagctcactggcttcccccgacccacctagttatccttaaaaactctgctccccagatgcttggagagactgatttgagtaatgataaaactccggtctcccgcacagccagttgtgcgtaaattactctctctattgcaattcccctgtcttgatgaattggctctatctacgcagcaggcgaggtaaacctcttgggtggttacaaaagcaagggtcctttctttccgagaccagaaatgcttgccttccacagtaggtacataaacagggctttgattcataaattagtttttttccttgtggcaggaattaattatgcatccaattctctaacttttttttttttttaagacagagtctctaccagtagggaaatgctcaccctcctctgtagtctactttttttttttttgaaacagtctttgctctgtcaccaaggctggagtgcagtggcaccatctctgctcactgcaacctccgcctcccaggttcaagtgattctcctgcctcagcctcctgagtagccaacacgtccctggctaatttttgtatttttagtagagatggggtttcaccatgttgggcaggctggtctcaaactcctgagctcaagccatccacccaccttggcctcccaaagtgctgagccaccgcacctggcccaattctctaacatctaatttttcaggactgactgctagattagagcttcaaatatgcaataagtaaattatcactttgaaaatattagaatataatagtaagatagccatagtaatagacgttcacatactacctgaaaaagatttatgcctccattgttctttttttttttttttttttgagatggagtcttgctatgtcacccaggctggagtgcagtggtgcaatctcagctcattgcaacctccgcctcccaggttcaagcgattctctgcctcagcctccagagtagctgggattacaggaatgcgccaccacatctggctagtttttgtatttttagtagggacggagtttcgctatgttggccaggctggtcttgaactcatgacctcaagtgatccgcctgccttggcctcccaaagtgctgagattacaggcataagccaccatacccagccccgttaccttttcagcatactttcacaggcatatattgctgggtcaagtgcagttagtagcaaggctacatcaaatcaaagatgccccttggtgattgagaggctctttaggtcattatagtgccccaggatgattgtcatgaacttggattgtcaaagaacaagaaatgcacattaacagatatttccaggacatctttagaaaccagttagagtttattgtacaactagagacttaactccaagaaatgaagtgagatacatccctctttggtaaaattttcacctaaatcaatagccatgtgtctttaagggcattaagaatctgccggcctagagtaaaatcagaaaatcccaccaacctttgactgataacgtcacttcagccaggtgttcccgcttgaaagcgtctttttcatacttcagaacaacacactcgtatgtgccctcgtcagatgggcgcagagccaggatcacaatggagaggttattagtgatatcaaagatggtccggttcttgtactcgggccatatattcatgtccccagacatcatagtcagcaccattttcttctccttttgccagtagatgcgagtttgtgccagctcttcaacagaaacattgtgaccacaggacagcgttgccacttctttcacttccttggtcacgtggataacacctatggagaggcaaacagaacaagattgtatatttattaaatacagattcctgcatggtcaggaatccaaagtcggcagtaacagaacttagggtgttgtgtctagtgactaagtatcaatccagtttgatttttggggtccccaatgctttttttctcttcattttttaaaaattgtggtaaaaaacacaacaggctgggcgtggtggctcacgcctgtaatcccagcactttgggaggccgaggcaggcagatcacttgaggtcaggagttcgagaccagccgggccaacatggtgaaactctgtctctactaaaaatacaaaaaattagccgggtgtggtggcgggtgtagtaatcccagctactcgggaggctgaggcaggagaatcacttgaacccaggaggcggaggttgcagtaagctgagattgcaccccagcctgggcaacaagagcaaaactccatctccaaacaaacaaacaaacaaacaaacacataacataaaatttatcatcttattgatttttaagtgtacagttcagtaatgttaagtatattcacattgttgtgaaacagatctctagaaattttcattttgcaaatctgaaactctatgcccattaaacaactcccctttccccctctcccctcagcctctggcaattgccattctgtttgtttgtatgaatttggctactttaaatatctcatagaaatagaatcatacagtaacagcctgtttatgattggcttatttcacttagcatgatgcactcaaggttcattcacgttgtagcatatgataggatttccttcctttggaatggtaatgatatgatcataaggataatgaataatattacacacacacccccccccacattttgtttgcccattcatctgtagatggacatttggcttgcttcccacctcctggctactgtgctgctatgaacatgggtgtgcaaatatctcttcaagaccctgctttcaattcttatggatatatggaattttggggtcatatggtagttctatttttaattttctgaggaacctcaatagtgttttctatagcagttgcacccgcaatgcttgttaaaggttttggaagtcactatctagaaaaactaaatgtgattgcataaaaaacaaatttggttttgaaaacaatgaagacaaatcactaaaatcagactcatggaccaatcattataacataacctatccccttcctttttcttgagaattttccaatgacatgcaagatttaggagcatatgagccttctctcacagcaggcaatttttagtcctattacttcttatttggtttacctaacacaataccacccccaagagaagtcagtcctgactaaggttctgggtacagtggtggtggaggagggcaaggtgctgttgcccacctctgtctagatagcctatattgaattactcttcatactatttcctttttttgcttcctctgtggtggctctatggaggggacaggtgctatgtcatttaatcccccaacaaccccacaagatatgtattattttccccattttgcagctgagacaactgagagattgagaggttcaggaagtctaggacagggcaggtcagcctgagattccaagggcctatgattctgcagtcatgacgaagaataagggagggagatgaggtcaactaagaagaaaaaagagggccatactttaaataggtagggaatataatcaatcttcattattcatgaattctcacttacagaaggcctccttcttggatctgttgcctggtcacttgattaggtaattttcagctactactgccttgagaaataaggaagaatttcactgtaaagacctagtctctgatgctcactgccttttcccttgcgtttctcctacagcccctctccccacaatcacgtgatgcaacaacacacacacacacacacacacacagatatgcacatgtacacgcattcatttaaactacagaactgcatttaaccgtgggaaaaatctaagaataaattttatccagattaagtgagctaaagacaatccatttcatgtgacttcagtggcgtggcacaggaataaaaccttcatctgtcaccttaatacacatcctgattcctccccttttcacttgagtgacttaggatttaaagctctcaggactgcctacttccctacctaccttaaaggcaaccatgactaagtgcaccctgctaacatccttgcctagaggctcctggttgttggtatagaaagaacatgggcttttttcattcaataaaatccacagtagttgtgtgaccttaagcaacttactttacttctctgaaccccagtcttcacattggttattatgaagattaaatgagataatttatggcaagcacatactgtaattcaatgcctagacccacaccaaatatgaatcccattctcctttctccaagggggtggggaatttaccaacctctaaggcttttgatttcgtctttggacaatttgactgaggaagttttgctttgctttatgttgaagtctgtttccctctagcttctacatgcattacaaaacacatctcattcttcttatgtaacaagacttgcagatatctgaggatacttatatcctctctcagacagttctgcaggttcccatctgcccctgttccttattgatgtactgaaagtgagtaccctcactttcctcactacacagtttgatttgtgtgtatatttttttgagagagcgaagtcactaaatctagcattccagacatccactgtgtgattggctcagagtagaaccgggttgtcacttcctttacctaaatctatgtttgcagcctaaagttgaattcaatatattagcagccaccttacacctttgatataactattgatatactgacaagcaaattgccttatttttccacctatacataccactgtgtgctgctcctacatccagttcaacaccccaccaaatgggtaaagctcttccagtgacgttatctttcaagagttatccagaatcttccccttccctgaatctccataagacgacacatctttctttcttttttctttttctttttttttttgagacggagtcttgttcttttgcccaggctggagtgaagtggcgcgatctcagctcactgcaacctccacccccaggttcaagcagttctcctgcctcagcctcctgagtagctgggattacaggcgcccgccatcatgcccagctaatttttgtatttttagtagagacagggtttccaccatgtttgccaggctggtctcaaactcctgatctcaggtgatcctcccacctcagcctcccaaaatgctgggattacaagtgtgagccaccacgcctagcatgatgagacatcgtgagcattcagaaatatggaaaggcacctgcttgtcttatgtatatagccagatgcctatgggccaggagttggggacagagacagggatccctagtgagtgagaaagtccactggtcccctgagaagacctgaatataagtgccaaccatgggttaaacgatgtgctcagccccaggggatatgaaagtcatagtaaggaatgtgagatctggaagggacttccatgatcattcattctcgtggccttatcttacaaatgaggaaactgagctgaggaaaagaaactgccccagttttacacatttttttctttctggcccaggcttttagggccattcttcttgtttaccgatttcttcagttttaggccacagtcagtaagttaagccaacactgtccccacccaccccaatccagccctaccactgagcccttttgctataagaaacagagtcccaggccgggcatcatggctcaagcctgtaatcccagcactttgggaggctgaggtgggcagatcacgaggtcaggagtttgagaccagcctggtcaacatggtgaaaccccatctctactaaaaatacaaaaaaattagccgggcatgttgggacacacctgtaatcccagctacttaggaggctgaggcaggagaatcacttgaacctgggaggcagaggttgcagtgagccaagatcacaccactgcactccagcttgggtgacagagtgagactccgtctcaaaataaataaataaataaataaataagaaacagagtccctttctttccaggcctgattgatcccatggttccaggctgaaatgactcccatgcttatacctttggactatttctaccatcttcaggtaccctaaatggatcctatatcctgcctttatctctttggctatctgcagtccatgccatacaattaccctccagcctggatttgctaaaagagtttttatttaaaatattctgttcatttctccatccacatagccaagaaatatcagcatatcaatatctaaactagtctctgtgtcaatagcaccaaaattccttagcaggctgtattttctgatttttggtttagaaggcatggtcattcttcctaggctcttgtaggacctaaaagcagcatccctctaaggccccagcgccccctgcccagtgctgtcgtactgtgccttctgggccctgtatcccctggagccacacagatccccttagggagacccatgtctagggacttcatttccaagccctctcttttcttagatagcaggatcatggggcactagcacctttccatctcaccagccattctcaggcctctgtcagactggatacggccccaccacagcactgaacaagagagttttgtgatggtgggtatttgcatagcaaagtgaggtaatgcagaaaggtccaggcacctcttcagcaattgtgtggaatgttgccagtccctgctttagggaatataactgaaagaaaggaagaaataaaaagacatacttgaagggagcatatttcaaagtgaagctatattagctaaagatcaaatgacaacccagacactcctagtgttgcaaggaaagcaaaatgagacgtagaaggaacatgggctatccatctccattgacttggattctagtcccagctcagccacttgctgtttcatctgtttcttcatctctaaataggtatgacacctaccccttgggatcactggaaaattcagttcaattaaatgatataaataaaaagtcccaaggacatagcaggtcttctgtaagagtttccatttttctttctccctcctcccactgccaactcttacctttcatttcactcaagggttatgtcagatatatagcactctggtcttgctatgggccagacagacagcaactcacttgtctgggcctcccaataatagggtctttccccaccgaactattcattcccagccaaaaagaatccaatatttctcactgattttggtatgtggtgatgttagcaaaagtgaaagcatagctgaaagagagactatctaattttggtgatggcttctgaggagtttttgtccagccttctgaggagaagagtgaagaagaacaggactaaaaagaggaacccaaaatcttccgaacaatttggaaattcacacgggaacccagttttcgggattccaccacacagagacagaaaacagtcattataaatttgcccaaatttatatcagttttgtctgttttagggactccatcacacacggacaaaaagcagttgaaacggaaatgtctctaacgattttgtctgcttcagtgactggcggggaaagtcagcacctggaaatctcaatattactgtctcaaacctggttgaacttctgagcttgctttgccatttttgaatgggcattgtaacacctacccaacccagtgggtgcaaggattcaaaatgagatactgctcataaaagtcctccacagtacctaggacattagagggagccagtgtcttccccagagatccacacagttcaggtcccactttgctcacatctactctcgtggccccttgtcaaagaggccttccctgactctccttgaacagcgccatcctccctgcccccctccatcctgctactctttagtctctttgcctgatttgtttctcttcaggcttgtctccagctgatatatatttttacaactgtgatgtatatttacaggtatatgtgatacataattacgtatggagctatggagcagaggcttcctcctttgttcactgccatatctgcagtgtctagaacagggcctggcccatagtaggtgctcagtaaatacttgctgaatgcatgtctaggcatgaggaaatgaggtctggctccatccactgtgtattagaatcataaccttgagcaagctgggtaacctctctgggcttcaggttccatctctgtaaaacagtcataatactattgctatgatttgaatgtgtcccctaaaggttttgtgttggaaatttaattccgggtgcaacagtgttgagaattgggactgttaaaaggtgattaggtcatggagactctgccatcatggatggattaatgccatttttttgggagtgggttcactacagcaggagtggcttccttataaaggatggttttggcctccttcctactctgccttgggcgtgctctcctgcctttctatcctctgccatgggatgatgcagcaagaaggtcctcatcagatgtgagccccttgaccttggacttcccagcctccagaacagtaagaaataaatctctgttctttctaaattacccaatgtcaggtattctgttatagcagcacaaaccagaccgagataactatcttccctgcttcacataattatcacagcgatcacaggataccagatgtaaagtgctttcttaactttagaatgctctacagattttaaatggggctgttctttctcatgcacaacagcctgctttgctgaaccacacccccataggaccagcatcaccatggtaactggctgattcttgaactgagttcagtgcccatagctggcatggggagcccctcctgcacctctacccagcagcagtcagaaagggccagaggctgtgaaaggaggcggagagaaggcagagatggacggcaacgctgctcgccttctggcgaatgcatggaaactgcccacctgtagggcacaatagggacactcaacactgctggcctcagcctctgcctctcctgaccccttggccaccctcctgctctgaccacttcaactctggactgctagccacacaggagaggaagctatttgccaacaagagtagagaccaagaattttagacaaataatggacctctcggccgggcgtggtggctcacgcctgtaatcccagcactttgggaggccgaggcaggcggatcaggagctcgaagatcatcctggctaatacggtgaaaccccgtctctactaaaaatacaaaaaaaataaattagccaggcgtggtggcgggctgatttttgtgtggaggacttttacgagctgtagtcccagctactcgggaggctgaggcaggagaatggcgtgaagccgggaggcggagcttgctgtgagccagagattgtgccactgcactccagcttgggcgacagagcaagactctgtctcaaaaaaaaaaaaaaaaaaaaaaaaaaggacctctcaagggctcaatctaggccaggcacccgtaatcccagcactttgggagctggccaaggcgggtggattgcttgagcccaggaaatcgagaccagcctaggcaacatagcaaaaaccccatcgctacaaaaagaaaaaatagatctcaatctacaacagaatattatttcagaatattatttggccgtaaaagcgaatggagtactaagacatacgcaacatggatgaacctgaaagacataatgctcagtgaaagaaaatagtcacgaaacgccacatattgtaagaaatgtccagaatattctttcttacctggattctggaaaaaaaggaagagaaaagaaatgtctagaacaggcaaattcatagagacagagagtaaattagtggttacgaggagatggggtacaggggaatgaggagtagctgcaaataggcgcaggtttctttctgggatgatgatttccatcatcatccagaacatttccttctggaattcgatagtgatggtggtttcacaacattgcaaatatactaaaacccactgaattgtacactttatttatttatttatttatttatttatttatttatttatttatttatttactgaggcagagtctcgctctgttgcccatgctggagtgcagtggcatgatcttggctcacagcaacccccgcctccagggttcaaaagattctcctgcctcagcctcctgagtagctaggattaaaggcacgggccaccttgtgtggttaatttttgcatttttagtagagacagggttttaccatgttggccaggctggtctcaaactcctgacctcaggtgatccacccatctcggcctcccaaaatgctgggattgcaggagtgagccaccgtgcctggctgaattgtatactttaaaacgttgaattttatgtcattgcaaataaaacatgaagggaaaagaagaatccatactaggaagacctgagtcttccccaccctctccgtgcagcctggaggcctggaggatgcagtggccagtctgcagtgcccctcccagggagttcaacctcagcagccgttagagaggctgccctcgcaggggtctgggagctgcatcaccactgctagtggagaagggagagaagcagttgacacaacatcttttaactcaccaaatgacgggacatacatgatctccctggaaacacaagtgtgctttttaaataaacattttccctgactatgaaataaacattcttagaaagaatggaagatatagaaaagcgtgaaagtcacctattgtctcaccacctggagattttaccgttcctggtttgtgcacactcttccaacaggagtgacccccctctaaatgtttgattaggtgaactagcaccgacagggctggtgtcagccctgggctaggtgctagccacacaaaggagacaggcagagctgcctctggcagccacaggcttgagacctgtgtctcctcgtgttcacactgttcctgacttttccccctgtttagaccctgctcatatactctgtaccatctgatccttactttttctctttctaaacagtatttatatccttaaaatgcacagggacttgaacagctgttgtcagggtgatgatggcaacaatcactgctcatgggacccctgggccagcagcatagcggtgtgtgttgcagggagaggaggatgtgttctgtgaatggtggcactttggggtattctcttttctcctagctctgagttctcagactataaacttataggcaatgcttttcctacatctcttgcctcctcctacaggaggcctttcccctctccttagacctgaccctctcttaaaggactccagctctgaaggaaaagctgcccacattggtccctctgagggctgccctgttagagcctctgccttactgccaccagttgctggactataaagtcaggcgtttctgcctccatagacagtgcctgcaggcctagagggggagaggagcctggctggttccaccctgtgcatgaaagaggagtcccttcccctgggcatcagtggctgggcaggaggagagggggaacacctctgccatggtgtggcaggagaggaaggcctagtgtggcaaatctctgccctgaataaagccctctataatcctactccactgtattcactgaatctcacctcccacagaccatgcacactcacacctacactcccgttgagcagtcctcactaattttacatggtacacactctccaacccatcaacttccttctgatccaattcttttcattaaagacatcatcagttactgtaagttactgaaataacctcctaataggttttgcacagtcactgtggctgccctacaagccactctgttcttcagtaacacttttttccttttaaagttatttacacctttactactgaaactcaaagtgtatggtggagcagcatcagcatcacctaggtgcttcttagaaatgcagaatctcaggccccatcccagacccacctaagcagaaacagcatttaaaaaactatatagactttattttttagagctgctttaggttcatcgaaaaattgaatgtaaagtaaccccctccccacatattcacagcttccgccactgtctacatcctgcgccagggcagtacacttgttacaatcaatgaacctacattaacacatcattaccaccccaaatctagagttcacgataggggtcactcctggtattgcatattctatggatttgggcaaatttataatgacttatatctatcattacagtattatgcaaaatagattcacttctctaaaaaattccctgtgctagaaactgcaatttagcaaaacccccaggctattggtatgtgtaaagagtgaacagagctggggtagaccacgccactctcctgggtaaagcccttccagcttcctgaataacatgcggattcatgattataactcacaagtgctgcagggtccggttcttgctcactgggccagtccctcctctgctacttcccagctcactgccccttcttgctggcagaggaagacagcacttcctcaggcagtgcctgtgccctgccttcaaagcacgtggctttgtttgttggccacactttaacacattcatttgagtggctattggattacttttcctctttccaatgatagtaaatttcacaaatgcaagagccatgtccccaggaccaagaaaagtctcttggttttaggagatgctcatgtttgttgaattaataaatgattaaacaaaagaatgaacacctgtgccagcctcatccttacctttgtgcctttgtccaggctgttgccctgaccagaattctctctccatcatccatctgcctctgtaaagcctgccctccttcctgcagcccagtctgttacccactttcccagatcttgggctcctacaatcagggcaaagcatttcattgctctttgcttgttctacatgggttagctttgcatttccgcaactaacatatgcagacctctttgagtgcaggaatcctagcctcaacttttatggcccacctggcacacagtaggtgcttcattgactcagtcacagcagcagtaaaaccaggatgtagctagagaacaaggtgctttcctaaacatctttctttagctcaaagatctctttccacttacctctgaccctaattttccttgtacaatttctaaagtctgggttttaatttttattttatgtcctcttttactttttttattgttctccctctttctgtctctccccctccctgccccccttatttctgggaagcctgtacaaatttccttctatatattttaaactcctctgtactccccagaagactagtttgggaatgcttccccagctccccagaaggaaattgtaactgttggaaatgtaatgtaactgtcaaatatataaaaaacctgaggtgtaaattgtgaaatgtaggccatgtttctcttggttctgaaacaatgtaaaatagctctggacagaaaattttaaatgaccaccatcgcagtcaagtaatctgtgggcccccaactcctcttctcttccctctacctctctctcacacctctgatattctaggcagtactttatgtgagaagtttttaagacaaggacccttaatagtcgggtctttgcagactggcaaatcatgctggagcccaaacttctttgtttttgggaaactgggaagtatgctgctcactagaaaacagatcttttgttttctgacttaaaaaaaaaaatcagaaccatcctgccagcagggacaagcctcacccttcttgacagtcccaaaagttcagcactcttaagatcacctgagcaggaacaaaagcctctagaagtcaaattattactttcaggacatatatgtaatacctatgtggcagattaaaaataactaaaaacataattttgtgttaaatctgataccacttaaagtcagatgccaatgttgaaaaaagatctcagcatccaaagcagaacaaataagattaatgtattaagaggaacttaagaaggttaagaagatgaatgtcattaagaggaattgtcctcaactactctcccgccttcagattggaaagaagatcaccattgttcaattttagaagcaggacactttcgctgagctgtatcatgaaaacatagtttgggactagactccgaggccagtatcggcacatcacaaaatgtaaatgagcatctaatattcatggaagagaccattatgaatcggctgtatggttttgttaaaataacactgtcccttccacgcttccttgaaggcctgggttcttgagttaacttggttgctaacttgctgtgtgatgataggcaggtcctttaacctctttggaccacagtcttctaatctttaaaatcttctgaaaacaccctgaaggttccttccagcttataggataatagaagggagcagctcagagaaccccatgtcctttctcttaaccctgtagcagttgactcagttaagttcctgaaagttgcttacctgaacagaagtgagaaagaccagccagcaccaagagctgaaagaaattgaggtatggacacttggatggtgatgttccctgcctccgtgtgtggcccatggcttcagatgcttagggtcaaaagtgaaagccaacaatttggacccaagtaagaccagggcacttcccaggtgcaaaacaggcagggctgatgacaatccaattgctcacgtagaagaccctccagtgatgtttacaaaacacacagagattggagggtgttcctgggtctccaaaggttgtggatttagtttcacagcctgaaaaaggaacaaataaaagtcattcaggaaggaaggtgtgcctactttgagttgcaaaactctcgagttgcctgctaaaattaattggagagcttaacctaagcaacctctaaagcagggcgtgaccctgaggaaaagcgaatggaaattctgtgaggggaccagttccaagaaccaaccacagcccttccatgaaaaggctttctacttaataggtggggtgaagatttggttagaaacaggagagctctaaggaccctccatatctgttagccaacctgcaaaagttcaaatcctcttctgaacataccaagaaacatagagcagacagtaagggtgtattttgtccaaggcaggacctaagttatgaaacaacttctttcttgacatattaacataagaaaacaagtatctcaattctttaaaccctctactcaaataatatatcataaaggggtatgagatctcaataaccagaaaagtctatccataaaaagggagggaaaaaaagacactgcagacgttacttatcaaaattatgtactccagggccaggcgtggtggctcacgcctgtaatcccagcactttgggaggctgaggtgggcggattacttgaggccaggagttccagaccagcctggccaacatggcaaaaccccatttctaccaaaaatacaaaaattagccaggtgtggtggtgggtgcctgtaatcccagccacttgggaggctgaggcacgagaattgcttgaatccaggaggtggaggctgcagtgagccaagatgattgcaacactgcactccagcctaggcgacagagtgagactccatctcaaaaaaaaaaaaaaaaaaaattatgtactgtcatgtgaggtggctagggattaatttttccagtaaatatgtcaaaattgagaaatgaaaataaacactgtgctccactgtcaccccttcaggctgctaccaggacacagccccgtgctgctcagagaatgcttgagtgtcctctttggagaccaccctagagctagagttccagccacgccatattgttttattagccatcatccattttagacaggattagttaaaagagacttattcaccagaatttgtttttcttaagatagaatcttgctctgtcacacaggctagagtgcagtggcgtgaccatagctcaccacagtctcaacctcccgagctcaagcgattttcccactttcactagaattttactggcttgagaaattcaaatacggcccacaaaaacaatatttgctaggatctaggatattttaaaataatgggccacaattctcactatgatgctccaaatatgtcgggaagccacagcctcctgtgggaatgagaccctaagggttcctttgagggcaagcctggatccaggaggtggtagcagaggtattgtttgtttaaaaagcagtgaggttgctggtaactagttctaccaagctatcccatagtaagataatagtaaatgtacttacttgctgaagaaaaattccactttttctttaaatcctttgatttcagggtaagactccacttctgagatgttctcttcttacagtctataaagcaatgacaaatcactttttctttgggtaatcttcagagaggcgacatttccccttctaacttctgttactttacagagggtttgagttcactcagtacttgtcagtgccaggagttggacagggtgtttgaagaagcgccctctgctgccgtcttcttctagttgcttttgtagaggctgtggctggggcaaatcacacagcagcctccctcaccaccgtgcatggactaacaaacatgaaacaccacgagcaccaggcggcctaggggaggagaagaatggtgcccgagaagagtgaggggcatctggctagccttgctgtgtgatgggaggccagcttcatgggctggctgtttctgtgctggtctcaagttttgttttagcacccagagttactcctgagtccctgcaggaataagctgtcaacctcatatgtaggggacacttttgggagagtgctcagctcacaggaccacccaactctactcccacctctgaatcccaccatcttcagagagtgggctcctgccagccacgctggacagtgaattctggtcaccctagccacagttgagtgcgcctctggtgggatgaggaagactttagtcatgcccatcactcccatttccaactaggttgccacccacccctgtgtgtccctttgtaggattctggagcccctgtgagtgagcagctgacccatgctggaccagtgtacttgtttgcacaggtggaacctgacagcaccttgcatgggttgcagtgagccgagatcacaacactacaatccagcttgggtaacagagcaagactccatctcaaaaaaaaaaaaaaaaaaaagacgccatccttcccacaccagccagaaagagagcaaaccgtgtgggtgagaaatactgactacagcggcggcttccttcatctcagcaacaagtttgtggcagagcttagtggataccaccctattcacctgagatttggaatactgaagctttggaaatcatgaaggcagaacttgctatgaaaggactccactgcactgtctccttctgtattggcagaaggggcctagtgagcacccttcttcacctgtgtcttgttctggtctcagatgcatattttgaatagttgcaaggaatatggatgtgacaattcctgccttacctctagtagatcaacattacattttcaagtaaagggaacatagattggaggtaagttcatgttttctattttcttgaacatttattcagatcaaagaaatgttttcactgattttagccacttctacttgatacattattacaatgcactggaagtgattttttttccaggtatttaaagtaatagaaagttatagatgtcaacttaaaagagcaaagaaatacagagttttagaaatttattttctttttttttttttagatgaagtctttctctgccgcccaggctggagtgcagtggtgcaatcttggctcactgcaacctccgcctcctgggttcaagcaattcttctgcctcagcctcctgagtagctgggactacaggcgtgtgccaccatgccaggctaatttttaaatttttagtagagatggggtttcaccatattggccaggctggtctcaaactcctgaccttgtgatccaccctcctcggcctcccaaagtgctgggattacaggcatgagccactgcacccagccgagttttagaaatttcatgagggactacatgaatacaaattttgacgatcacagacaccctcaaattttaagaatcccagtgaaatcctaacctgccttggagaaacacacattaaacaactttgccattagcgctttgatgtgacttaatcaaagaggctggaagaaaggaacaccaggaaggtactttacagagtttccccaatcctgattgtaaaattcagaaggcttctcttccaagattatgtactaatgggatgtgtttaattcctcttcctcctacaatgtgtctaggagcatgacctgtggaccacagatttctaaggtaaatttctggacactggaggtgagatggatgaagacgggcaaaggaagccgaacccgaatacctatattactggaaaacaaaacaaaacaaaacaaaaccaagtaaaagatttaaaaggaggctgggcacagtggctcatgcctgtaatcccagcactttgagaggctgaggtgggcggatcacttgaggccaggagttcgaggccagctggccaacgtgatgaaaccccagctctccaaaaaaaaaaaaaaaaccaaaaaactgggcatagtggtgcatacctgtaatcccagctactgggaaggctgagacatgagacttgcttgaacttcagaggcggaggttgcagtgagctaagattgtgccattgcactccagcctgggtgacagagcaagattctgtttcaaaaacaaaacaaaacaaaacaaaaaaactttaaatgagtttgttctgaggagcagacccagggttggagaagaataaagcaggaattactgctcctcagtgtaaattctttagtgccacttatttttttgtaaatccatccttggctttactgtaataaaagtaaaagaaattcttttaaaaataattcacataaaaattcttttaaaaatttttatgtgaaaaattgaaaggataaatttatgaaagtatatttttataattctagggtgagcaagacacaaaacttggaagccacgaaaaaagaaaagatacacagatttgaattcataaaaattaaaaatatttgtacaatgaaagacattataaatgaaatgaaaacacaatcacagactgtagaggacccagcaggaagagatgacgagagggagatgcagctttgtcactcagaggttggtgcagaggctgttgcgacaccgtaggggaagcctggccctttgctttacccctgaacaggatgatctctgtggaaatgaaggttccatctttctgctcttgaccttggagccacttcacctcctcatgctgataaagctggcctgagctcaaccttcctacccttccgttcagcatccacagggagggctgggctggctcctggcagtggcctcagtgctgtcatttgcaggttgcctactcagggcccacggtgctagcctgactgctgggaaaacccctttcccacagtgggctcactgttgccaagtaaacaaaacctgttgcactgacaaaaattttcaggggagtttttcatgttctaagatgaccctcccgtgaggtttagaagttcatttttagatatgacttcatctgggcatgtctataaggcctgcacccatcatagggcagctgatctaggctttaaggctatggtgctccccaggagtgccacagcctgctaaagttggcagcaaactcatcaaagtgggagagttcacctcttcctcttaaaatgctgtcacattctttctggttctttgagatggaaatcaccaaaatgcttaaaatgaaaacaagtgactttcagagctagccctcgttcagagtgagggccgtcttcttactaacccaccacacactcttcctcctatacttggcatcttactcttcctgcctgtgactctttttttttaattaatttttttattatcaatttttgtttattattctactttaagttctagggtacatgtgcacaatgtgcaggtttgttacatatgtatacacgctccatgttagtgtgttgcacccattaactcgtcatttacattaggtatatctcctaatgctatccctcccccctccccccagcccatgacaggcccccgtgtgtgatgctccccttcctgtgtccaagtgttctcattgttcaattcccacctatgagtgagaacatgtggtgtttggttttttgtccttgtgatagtttgctgagaatgatggtttccagcttcatccatgtccctacaaaggacatgaactcatccttttttctggctgcatagtattccatggtgtatatgtaccacattttcttaatccagtctatcattgatggacatttgggttggttccaagtctttgctattgtgaatagtgccacaataaacatacgtgtgcatgtgtctttagagcagcatgatttataaccctttgggtatatacccagtaatgggatggctgggtcaaatggtatttctagttctagatccttgaggaatcgccacactgtcttccacaatggttgaactagtttacagtcctgccaacgtgtaaaagtgttcctatttctccacatcgtcttcagcacctgttgtttcctgactttttaatgatcgccattctaactggtgtgagatggtgtcttattgtggttttgatttgcatttctctgatggccagtgatgatgagcattttttcatgtgtctgttggctgcataaaagtcttttttgagaagtgtctgttcatatcctttgcccactttttgatggggttgttttttcttgtaaatgtgtttgagttcattgtagattctggatattagccctttgtcagatgagtagattgcaaaaattttctcccattctgtaggttgcctgttcactctgatggtagtttgttttgctgtgcagaaactctttagtttaattagatcccatttgtcaattttggcttttgctgccattgcttttggtgttttagacatgaagtccttgcccatgcctatgtcctgaatggtattgcctaggttttcttctagggtttttatggttttaggtctaacacttaagtctttaatccatcttgaattaatttttgtataaggtgtaacgaagggatccagtttcagctttctacatgtggctggccagttttcccagcaccatttattaaacagggaatcctttccctatttcttgtttttgtcaggtttgtcaaagatcagatattgtagatgtatggtattatttctgagggttctgttctgttccattggtctaatctctgttttggtaccagtaccatgctgttttggttattgtagccttgtagtatagtttgaagtcaggtagcgtgatgtctcccgcttttttcttttggcttaggattgtcttggcaatgcaggcccttctttgttccatatgaactttaaagtagttttttccaattctgtgaagaaagtcattggtagcttgatggggatggcattgaatctataaattaccttgggcagtatggccattttcacgatattgattattcctatccatgagcatagaatgttcttccatttgtttgtgtcctcttttatttcattgagcagtggtttgtagttctccttgaagaggtccttcacatcccttgtaagttggattcataggtattttattctctttgaagcaattgtgaatgggaattcactcatgatttggctctctgtttgtctgttattggtgtataagaatgcttgtgatttttgcacattgattttgtatcctgagactttgctgaagttgcttatcagcttaaggagattttgggctgagacaatggggttttctaaatatacaatcacgtcatctgcaaacagggacactttgacttcctcttttcctaattgaataccctttatttctttcccctgcctgattgccctggccagaacttccaacactatgttgaataggagtggtgagagagggcatccctgtcttgtgtcagttttcaaagggaatgcttccagtttttgcccatcagtatgatattggctgtgggtttgtcataaatagctcttattattttgagatacgtcccatcaatacctaatttattgagagtttttagcatgaagggttgttgaattttgtcaaaggccttttctgcatctattgagacaaacctgtggtttttgtctttggttctgtttatatgctggattacgtttattgatttgcgtatgttgaaccagccttgcatcccagggatgaagcccacttgatcatggtggataagctttttgatgtgctgctggattcagtttgccagtattttattgaggatttttgcatcaatgttcatcaaggatattggtctaaaattctctttttttgttgtgtctctgccaggctttggtatcaggatgatgctggcctcaaaaaatgagttagggaggattccctctttttctactgattggaatagtttcagaaggaatggtaccagctccttcttgtacctctggtagaattcggctgtgaatccatctggtcctggatttttttttggttggtaggctattaattattgcctaaatttcagagcctgttatttaaggatttagggatttaacttcttcctggtttagtcttgggagggtgtatgtgtccaggaatttatccatttcttctagattttctagtttacttgcatagaggtgtttatagtattctctgatggtagtttgtatttctgtgggatcggtggtgatatcccctttatcatttgatattgtgtctatatgattcttctctcttttcttctttattagtcttgctagtggtctatcaattttgttgatcttttcaaaaaaccagctcctggattcattgattttttgagggtttttgtgtctctatctccttcagttcttctctgatcttagttatttcttgccttctgctagcttttgaatgtgtttgctcttgcttctctagttcttttaatggtgatgttagggtgtcaattttagatctttcctactttctcttgtgggcatttagtgctataaatttccctctacacactgctttaaatgtttcccagagattctggtatgttgtgtctttgttctcattggtttcaaagaatatctttatttctgccttcattttgttatgtacccagtagtcactcaggagcaggtgtttcagtttccatgtagttgagtggttttgagtgagtttcttaatcctgagttctagtttgattgcactgtggtctgagagacagttcgttataatttctgttcttttacatttgctgaggagtgctttacttccaactatgtggttaattttggaataagtgctatgtggtgctaagaagaatgtatattctgttgatttggggtggagagttctgtagatgtctattaggtctgcttggtgcagagctgagttcaattcctggatatccttgttaactttctgtctcgttgatctgtctaatgttgacagtggggtgttacagtctcccattattattgtgggggagtctaagtctctttgtaggtctctaaggacttgctttatgaatctgggtgctcctgtattgggtgcatatatatttaggatagttagctcttcttgttgaattgagccctttaccattatgtaatgaccttctttgtctcttttgatctttgttggtttaaagtcttttttatcagagactaggattgcaacccctgcctttttttgttttccatttgcttggtagatcttcctccatccctttattttgagcttatgtgtgtctctgcatgtgagatgggtctcctgaatacagcacactgatgggtcttgactctatccaatttgcccgtctgtgtcttttaattggagcatttagcccatttacatttaaggttaatatttttgtgtgtgaatttgatcctgtcattacgatgttagctggttattttgctcgtcagttgatgcagtttcttcctaccatcaatggtctttacaatttggcatgtttttgcagtggctggtactggtttttcctttccatgtttagtgcttccttcaggagctcttttagggcaggcctggtggtgacaaaatctctcagcatttgcttgtctgtaacggattttatttgtccttcacttatgaagcttagtttggctggatatgaaattctgggttgaaaattcttttctttaagaatgttgaatgttggccccccactctcttctggcttatagagtttctgctgagagatccgctattagtctggtgggcttccctttgtggaaaacccgacctttctctctggctgcccttaacagtttttccttcatttcaactttggtgaatctgacaattatgtgtcttggagttgctcatctcgaggagtaacttcatagtgttctctgtatttcttgaatttgaatgttggcctgtcttgctaggttggggaagttctcctggataatatcctgtagagtgttttccaacttggttccattctccccatcactttcaggtacaccaatcagacgtagatttggtcttttcacatagtcccatatttcttggaggctttgttcatttctttttactcttttttctctaaacttctcttcttgcttcatttcattcatttcatcttccatcactgacactctttcttccagttgatctaatcggctactgaagcttgtgcattcgtcatgtagttctcgtaccacggttttcagctccaacaggtcatttaaggacttctctacactggttattctagttagccatttgtctaatcttttttcaaggtttttagcttctttgagatgggttcaaacttcttcctttagctcggagaagtttgatcatctgaagactttttctctcaactgatcaaagtcattctccatccagctttgttctgttgctggtaaggagctgcatacctttggagggggagaggcgctctgatttctagaattttcagcttttctgctctgttttttccccatctttgtggttttatctacctttggtctttgatgatggtgacctttgatgatggtggggttttggtgtggatgtcctttctgtttgttagttttccttctaacagtcaggaccctcagctgcaggtctgttggagtttgctggaggtccactctagaccctgtttgcctgggtatcagcagcggagggtgcagaacagcgaatattgctgaacagcaaatgatgctgcctgatcgttcctctggaagttttgtctcagaggggtacccagctgtgtgaggtgtcagtctgtccctactggagggtgcctcccagttaggctactcgggggtcagggacccacttgaggaggcagtctgtccattctcagatctcaaactccacgctgggagaaccactactctcttcaaggctgccagacagggacatttaagtctgcagaggtttctgctgccttttgttcagctatgccctacccccagaggtggagtctacagaggcaggcaggcctccttgagctgtggtgggctccacccagttcgagcttcccggccgctttgtttacctactcaagcctcagcaatggcgggtacccctaccccagcctcgctgctgccttgcagttcgatctcagactgctgtgttagcaatgagtaaggctccgtgggcgtgggaccctccgagccaagctcggcatataatctcctggtgtggcatttgctaagaccattggaaaagtgcagtattaggctgggagtgacccgattttccaggtgccgtccgtcaccacttcccttggctaggaaagggaattccctgaccccttgcccttctcgggtgaggcgatgcctcaccctgcttcggctctcgctcagtgggctacacccattgtcctgcccccactgtccgacaaaccccagtgagatgaacccagtacctcagttggaaatgcagaaatcacctgtcttctgtgtcgctcacgctgggagctgtagactggagctgttcctattctgccaccttgcctcataatccttgcctgtgactcttgacacactgtcccccaacttccttggctgcctttccccattctctctgcccatctaaacatctttcttcctcaaaggaccaggccaaatgccatttccccaagaagctttcctgactcttctaaatctccatctgctctttcccttctctgagatcctatgtctgtgccactcatttggcatcattccaatccctccccacccccccaaatttattgagtgcctactatgtgcctggaagggttcaaacattggggaagcaaaatggcttgactaggagagataaggacaacatggaccgatcctaagaaaaagaaacagtagcagaaaaagagcagggcagctagctgaatttaagtctgcagtgtggcgaaaatgccaacaaaatattgcgagacatgagtggcaatatgacataccatggccagaaattatctttttggattctttctacatgaacccagatccttattggaatattacgtccaatttcaaactaaatgtggagaggatccggcagaaagtaacaaacaataacaaaaaggatgctaaaccaggcagctcagagaacagaggaatggggagccaagatgttttagatgggccaaatgattttgaggcctttggtaatgatcctctgtggctttgaggtgtttctgtttctttgttttgagctagtcatggccataaatgccttctacatctgtaggcgaccaaactggagaaaataatctacatgtaagcaggataaattttgattgtgtttaaggaagcattttttttgtgttgaagctggaaaaggtgactttcaaagaaggttgcaaatttttattgcctgatgctttaagaagagaagagacaaatcctgtttggggaaaacagagatttctctgcctgagagtaagggactatggtggaatcccaggcagtccacgattctaggacctgaggcgttaaatgtcactgccactggctgccactcccctgccctgccacactgtccaccagaaccactaacgaagttacaaaagtcacccttttcagtttctatttcattttccctgtcccctgagaaacaggaaccaaggactaggcagtaggagaagccagacatgatctatgctttcaaagtgggtcaccatggcgtgaatgaattagagctgaagggtcatggaaacagcctgttcctcctccctctctcctccccagctctgtcccccacttcttcctttttttgtattattctgaaaagtgaatcaaacagttgccattttttttatattacgttggtccacaacgtcaaaggtcatggtttccagatttcggaaaaggaatttgattctgttcctaaaattaaagagaaattgcaaggcttggatggaaaggggaagttccccttcaataactctttctagaagggtcaacatttaaaacttaacgtgtggccgggtgcagtggctcacgcctgtaatcccagcactttgggaggccaaggagggtggatcacttgaggtcaggagtttgagaccagcctggccaacatggcaaaaccccatctctactaaaaatttaaaaattagctgggcatggtggtgggtgcctgtaatcccagctactccggaggctgaagcatgagaatcgcttgaacctgggagatggaagttgcagtgagctgagattgaacaattgcactccagcctgggcaacagagtgagactctgactcaaaaaaaaacaaacaaacaaacaaacaaaaaaagttaaccttatgtagatatttacctattatttgaatacgagaaggaatttgaccacttgagggcctgatttatacaagtaccacatgatgaagaacaggattttatggagtgaagatccttaacagcactctcagattgaatctctcctgagccttgaactgatttctccagtggccactggggttgcgtgactcctccaatggccccagacacaactaagaaatgtgcctaaactggctgccatttgaaaccttttggtgtcctttgtttagatgccccaccctaaacttcaggagttctctccagagagtaattttaggaatgaatgccagagaccaagggatgagggactgttgcctcatcagagggggaaggagcttgctggaaaaacaagaggaacaaaatgtcccctgactagatttttctttaccttttgtctcaaggactcttctagaaatagaaataagagtagattcatgtacatttgcccaggttgaccccagtggaggaattgtggggcagaaagaatgataacatgaaagaaagataatttcagtaaggccccccaaacttttggtttagggagcagtcactttttgtttcctagaagctgtattttcacctactgagattctagcaggcagtgaagtccccttaggatgggaccgtgtgcaagagcattgctgtttcattgtaaaccctggaagcggaacttaggactcagctggccagctgagcttctcttcctgtgggaaatcccagcgaaaccaggagaaagggagcaacagaggtcatctgccaggaaatgtaccaaagaagatttgaaaattactggtggatctccagagcaaaggctggaaagccctgacctacaggagcgggctactgcattgttgggaggagcaggattcacatccacatggacttccctcgggtctctttctgctctgcagagaggggtggaagctgctcctagggttttttttttgttttttgttttttgttttaagatggagtctcggtctgtcgtccaggctacagtgtagtggcacgatcttggctcactgcaacctctgcctcccaggttcaagcgattctcctgcctcagcctcccgagtagctgggattacaggcatgcaccaccatgcccggctaattttgtattcttagtagagaggaggtttcaccatgttggccaggctggtcttgaactcctgacctcatgatccgcctgcctcggccttccaaagtgctgggattacaggtgtgagccaccgcacctggccactcctaggttttaaaacaccggtttgtatccacttatctcttttgctcctctccatatagtctcccatctctacctcttgctatatttgattcctgcctgcttgttagaattacggtgcatatcttagatttttctttaaataccacttttagactgtcatcaacaagaggcttaaggctctttgggagtgggatatagaatatttatttatttatttagagacaggttctcactctatcacccaggctactgtgcagttgtgtgaccctagcttattgtaaccttgaactctcaggctcaagcaatcctcctgccccagcttcctcagtagctaggactacaggtgtgcaccaccacacctggataattttatttatttatttattttgtagagacagggtctcactttattgcacaggctggtcttgaactcctgggctcaagtgatcctcccacctctgcctcccaacgtactgggtttataggcgtgagctgcgcccagcaaatattttaaaaattagactcaggaggttcaaatctttcataggtgtttagtctatcatgtcatttcaatttttttctaagtgacagtagaaggaatggaagaagtcctggctgggagttcagagggcatgggctccaggcccacttctctccatgtgtgaaactgagttatataaactctgagtaactgtcttcactggcctcagcttcctccctagaaagttattgtcagctgggcacggtgcctaatgcctataatcccagcactttgggaggctgagacaggtggatcacttgaggtcaggagttcaagaccagcctggccaacatggtgaaactgcctctctactaaaaatacaaaaattagctgggcgtggtggcgatcgcctgtaatcccagctacttgggaggctgaggcaggataattgcttgaacctgggaaatagaggttgcagtgagctgggattgcaccactgccctcaggcctgagtgacagagccagactccgtctcaaaaaaaaaaaaaaaaagaaacttattgtcaactgaaaattcacaaggtttataaatctggaaaagagagctttatttttataaagggttgcagacggcaggatggccattctcagtctgggaagtgtagccttccagccagaagccaaaaagaggcacctccagggaaaggcaaagggaacaggaatgtatgctgagcagagcagccaagtacacatatttatttatttatttattgagacaaggtctcactctgtcacccaggctggagtgcagtggcacaatctcagctcacttcaacctccacctcccaagttcaagcgattctcgtgcctcagcctcccaagtaggtaggattacaaaaatacatgtatttaataaactataggaggagtcatgaatatttatgaaaggagaaacatgtgcatgtgcaac

SEQ ID NO: 3 - DNA, 115067 bp, Homo sapiens
agataaaatttattgttacttatatttcaatgtgctaaaagaattgattgtttaaagcaaaattataacaatgtattatgtgtttataacatgggtaaaaataaaataaatgataatagcacaattgtaaaatttactgacaagttcttaaaagactcagttaaagagagactactttttaaaataccataaaattacttcagaatgtaaatagaaagaataattactatgacttttgaagattttgaaaataaattaataagagatagccttaatggatactaaaattattataagatattttaaatctatgttaattaagagtatgatacataattgcccccaagctgtatattatttcacatacatgaaagattttataatattactaagaaaacatcacaaatcagtggaggagtaaaccagaattaaacaaataacaagggaacaactggtttaaaatgagggaaaggatttatttacattctcacctcaccaacttagtaaagtcaattttacataaagttacatgtaaaactgcaatcttggaaaccaaaaaaagataaaattgaaaaattttatttcaagttgggaaatgggttttgtcagattcaaaggggttggaagaagttgcataaaaaatatccatagttttactaaaaatatataaaatatctgaatttaaaaaatgtcttaatgcaaacatgtttggaaaggaaaatataaaaaataatatcttagaaaactgaagaaaaacagtaaacttggaggactgatacacctaacttcaagacttattataaagctacagtagtcaagacagtgtggtattagcaaaagaatagattatagatcaatagagagcccagaaatagacctacaaaaatacagtcaagtgatatttgacaaaggagcaaatggtatacaatgaagaagatatcattttcaacaaataatgctagaacaactggaaatccagatgcaaaaaaaaaaaaagaaaaaaaaaaaacaagaattagctcaaaatgggtcataggcctaaatttaaaatgaaaaactgcaatactagaagatgacataaaagaaaatatagatgaccttgggtccattcatgactgtgtgggtacaacaccaaagtcacaatgcatgaaagaaagaattgatgagttacactttattaaaattaaaaatctctgctttgtgaaagacaccatcaagagtgtgaaaagacaagacacagactgggagaaaatatttgcaaaagacatatttaatttttaaaaaactgttatccgaaatatataaagaactcctaaaactcagcaataggaaaatgaaccactgatttaaaatgggtcaaaaaccttaacagacaccttaccaaagaagatatgcagatggcaaatgctgtgctttgaatgtatccccccaaaagccagggttggaaacttaattaccaatgtaacagtgttgggagatggggcctaatgggataattttaggtcatgaggactccctcccttatgaatggatgaatgtcattatcacaggagtgggtttgttatcactgccataagtttgttataaaagtgaattaggtccctttttgttctctctcactgtctccctgtcttgcccttctgccttctgccatgggatgatgcagcaagaagccccttgaaagatgctgacaacttgttattggacttcccagcatgtgaagccatgagaaataaatttctattgtttataaattacacagtttcaggtagtctgttatagcagcacaaaacagactaagatggctatctttccatttatctttgtcttcttaatttctttcattgatgctttgcagttttcagcatataggtcttttacctttttgtttaagtttattcctaagtttttaagaaattttggtgctattataaattgaattgttttcttaatttcctttgcaggttgttcattgttagtgtatagaaaagcaactgatttttgtgtgttgatttcgtatcttgcaactttactgaattcatttattagatttaacttttttttttctggtggaatctttagagctttctatatataagatcacatcatctgtgaacacagataatgttacttcttcctttccaatttgaatgccctttatttctttttcttttttttttttattattattatactttaagttttagggtacatgtgcacattgtgcaggttagttacatatgtatacatgtgccatgctggtgcgctgcacccactaactcgtcatctagcattaggtatatctcccaatgctatccctcccccctccccccaccccaccacagtccccagagtgtgatattccccttcctgtgtccatgtgatctcattgttcaattcccacctatgagtgagaatatgcggtgtttggttttttgttcttgcgatagtttactgagaatgatgatttccaatttcatccatgtccctacaaaggacacgaactcatcattttttatggctgcatagtattccatggtgtatatgtgccacattttcttaatccagtctatcattgttggacatttgggttggttccaagtctttgctattgtgaataatgccgcaataaacatacgtgtgcatgtgtctttatagcagcatgatttatagtcctttgggtatatacccagtaatgggatggctgggtcaaatggtatttctagttctagatccctgaggaatcgccacactgacttccacaatggttgaactagtttacagtcccaccaacagtgtaaaagtgttcctatttctccacatcctctccagcacctgttgtttcctgacttttaaatgattgccattctaactggtgtgagatggtatctcattgtggttttgatttgcatttctctgatggccagtgatgatgagcattttttcatgtttcttggctgcataaatgtcttcttttgagaagtgtctgttcatgtccttcgcccactttttgatggggttgtttgtttttttcttgtaaatttgtctgagttcattgtagattctggatattagccctttgtcagatgagtaggttgtgaaaattttttcccattttgtaggttgcctgttcactctgatggtattttcttttgctgtgcagaagctctttagtttaattagatcccatttgtcaattttggcttttgttgccattgcttttggtgttttggacatgaagtccttgcccatgcctatgtcctgaatggtaatgcctaggttttcttctagggtttttatggttttaggtctaacgtttaaatctttaatccatcttgaattgatttttgtataaggtgtaaggaagggatccagtttcagctttctacatatggctagccagttttcccagcaccatttattaaatagggaatcctttccccattgcttgtttttctcaggtttgtcaaagatcagatagttgtagatatgcggcgttatttctgagggctctgttctgttccattgatctatatctctgctttggtaccagtaacatgctgttttggttactgtagccttgtagtatagtttgaagtcaggtagtgtgatgcctccagctttgttcttttggcttaggattgacttggcgatgtgggctcttttttggttccatatgaactttaaagtagttttttccaattctgtgaagaaagtcattggtagcttgatggggatggcattgaatctgtaaattaccttgggcagtatagccattttcacgatattgattcttcctacccatgagcatggaatgttcttccatttgtttgtatcctcttttatttccttgagcagtggtttgtagttctccttgaagaggtccttcacatcccttgtaagttggattcctaggtattttattctctttgaagcaattgtgaatgggagttcactcatgatttggctctctgtttgtctgttgttggtgtataagaatgcttgtgatttttgtacattgattttgtatcctgagactttgctgaagttgcttatcagcttaaggagattttgggctgagacagtggggttttctagatatacaatcatgtcatctgcaaacagggacaatttgacttcctcttttcctaattgaataccctttatttccttctcctgcctgattgccctggccagaacttccaacactatgttgaataggagtggtgagagagggcatccctgtcttgtgccagttttcaaagggaatgcttccagtttttgcccattcaatatgatattggctgtgggtttgtcatagatagctcttattattttgaaatacgtcccatcaatacctaatttattgagagtttttagcatgaagcgttgttgaattttgtcaaaggctttttctgcatctattgagataatcatgtggtttttgtctttggctctgtttatatgctggattacatttattgatttgcgtatattgaaccagccttgcatcccagggatgaagcccacttgatcatggtggataagctttttgatgtgctgctggattcgttttgccagtattttattgaggatttttgcatcaatgttcatcaaggatattggtctaaaattctcttttttggttgtgtctctgcccggctttggtatcagaatgatgctggcctcataaaatgagttagggagaattccctctttttctattgattggaatagtttcagaaggaatggtaccagctcctccttgtacctctggtagaattcggctgtgaatccatctggtcctggactctttttggttggtaaactattgattattgccacaatttcagctcctgttattggtttattcagagattcaacttcttcctggtttagtcttgggagagtgtatgtgttgaggaatttatccatttcttctagattttctagtttatttgcgtagaggtgtttgtagtattctctgatggtagtttgtatttctgtgggattggtggtgatatcccctttatcattttttattgtgtctatttgattcttctctcttttcttctttatcagtcttgctagtggtctatcaattttgttgatcctttcaaaaaaccagctcctggattcattgattttttgaagggttttttgtgtctctatttccttcagttctgctctgattttagttatttcttgccttctgctagcttttgaatgtgtttgctcttgcttttctagttcttttaattgtgatgttagggtgtcaattttggatgtttcctgctttctcttgtgggcatttagtgctataaatttccctctacacactgctttaaatgcatcccagagattctggtatgttgtgtctttgttctcgttggtttcaaagaacatctttatttctgccttcatttcgttatgtacccagtagtcattcaggagcaggttgttcagtttccatgtagttgagcagctttgagtgagattcttaatcctgagttctagtttgattgcactgtggtctgagagatagtttgttataatttctgttcttttacatttgctgaggagagctttacttccaactatgtggtcaattttggaataggtgtggtgtggtgctgaaaaaaatgtatattgtgttgatttggggtggagagttctgtagatgtctattaggtccacttggtgcagagctgagttcaattcctgggtatccctgttgactttctgtctggttgatctgtctaatgttgacagtggggtgttaaagtctcccattattaatgtgtgggagtctaagtctctttgtaggtcactcaggacttgctttatgaatctgggtgctcctgtattgggtgcatatatatttaggatagttagctcctcttgttgaattgatccctttaccattatgtaatggccttcttagtctcttttgatctttgttggtttaacgtctgttttatcagagactaggattgcaacccctgcatttttttgttttccatttgcttggtagatcttcctccatccttttattttgagcctatgtgtgtctctgcacgtgagatgggtttcctgaatacagcacactgatgggtcttgactctttatccagtttgccagtctgtgtcttttaattggagaatttagtccatttacatttaaagttaatattgttatgtgtgaatttgatcctgtcattatgatgttagctggttattttgctcgttagttgatgcagtttcttcctagtctcgatggtctttacattttggcatgattttgcagcggctggtaccggttgttcctttccatgtttagcacttccttcaggagctcttttagggcaggcctagtggtgacaaaatctctcagcgtttgcttgtctgtgaagtattttatttctccttcacttatgaagcttagtttggctggatatgaaattctgggttgaaaattcttttctttaagaatgttgaatatcggcccccactctcttctggcttgtagggtttctgccgagagatccgctgttagtctgatgggcttccctttgagggtaacccgacctttctctctggttgcccttaacattttttccttcatttcaactttggtgaatctgacaattatgtgtcttggagttgttcttctcgaggagtatctttgtggcgttctctgtatttcctgaatctgaacgttggcctgccttgctagattggggaagttctcctggataatatcctgcagagtgttttccaacttggttccattctccccatcactttcaggtacaccaatcagacgtagatttggtcttttcacatagtcccatatttcttggaggctttgctcgtttctttttattcttttttctctaaactttccttctcgcttcatttcgttcatttcatcttccattgctgataccctttcttccagttgatcgcattggctcctgaggcttctgcattcttcacttagttctcgagccttggttttcagctccatcagctcctttaagcacttccctgtattggttattctagttatacattcttctaaatttttttcaaagttttcaacttctttgcctttggtttgaatgtcctcccatagctcagagtaatttgaccgtctgaagcctttttctctcagctcgtcaaagtcattctccatccagctttgttccgttgctggtgaggaactgcgttcctttggaggaggagaggcgctctgcattttagagtttccagtttttctgttctgttttttccccatctttgtggttttatctacttttggtctttgatgatggtgatgtacagatgggttttcggtgtggatgtcctttctgtttgttagttttccttctaacagacaggaccctcagctgcaggtctgttggaataccctgccgtgtgaggtgtcagtgtgcccctgctggggggtgcctcccagttaggctgctcgggggtcaggggtcagggacccacttgagaaggcagtctgccggttctcagatctccagctgcgtgctgggagaaccactgctctcttcaaagctgtcagagagggacacttaagtctgcagaggttactgctgtctttttgtctgtgccctgcccccagaggtggagcctacagagacaggcaggcctccttgagctatggtgggctccacccagttggagcttcctggctgctttgtttacctaagcaagcctgggcaatggcgggcgcccctcccccagcctcgctgccgccttgcatttgatctcagactgctgtgctagcagtcagcgagattccgtgggcgtaggaccctccgagccaggtgtgggatataatctcgtggttcgccgttttttaagccggtctgaaaagcgcaatattcgggtgggagtgacccgattttccaggtgcgtctgtcacccctttctttgactcagaaagggaactccctgaccccttgcacttcccaagtgaggcaatgcctcgccctgcttcggcttgcgcacagtgcacgcacccactggcctgcgcccactgtctggcactccctagtgagataaacccggtacctcggatggaaatgcagaaatcacccgtcttctgcgtcgctcacgctgggagctgtagaccggagctgttcctattcggccatcttggctcctcccacctatttctttttcttacccaattgtttggctagggcatccagcactgtgttgaatagaagtgatgaagtaggcagacttaccttgttcctcatcaaggaaaagctttctgtttttcaccattaagtgtgatgctagcagtgggattttcacatatcccctttattatgttgaggtaaattccttctttccttctattcctagtttgttgagggttttatgatgaaagagtgttaaattttaccaagtattttttctgtgtctattgagatgaccatatgattttaatgatgtaccatactaattttcatatgttgaatcatctttgcattccagggataaatcccacttggtcatagagtataatccttttaatgtactatagaatttggtttgctagtattttattgcagatttttgcatcagggatattggcctgtagttttcttttcttgtagtgtctttttctggctttgctgtcaggttaacactggccttgtaaaatgagtttggaagtgttctatcctcttcaaatttttggaagagtttgagaaggattagtgttaattcttctttaaatgtttgatagaattcaccagtgaagtcatctggtcttgagcttttctttaatgggaagcttttgattgatgattcaatctgattactagttacaggtctgttcagattatctatttctttatgattcagctttggtaggttctgtttctaggaatgtgtccatttcttttaggttatccaatttgttggaacgtaagtgttcacagcagtctcttacaatatttttttaatttctgtggcatcaattgcaatgtctcctgtttcatttttcatcttatctgagtcttctctttttttttatagagacagggtcttgctacgttgcccaggctggtcttggacacctggcctcaagtgatcctcctaccttgggctcccaaagtgctgggattacaggcataagccaccattacgctttaatcattatttcctttctctgctaactttgggcttagcttgttcttctttttttagttatttaacatgtagggttagattttttatttgagatatttttaatatgtttattgttatcaacttccctcttagtattgcatttgctgcattccataaagtttggtatgttattttctttgtttctagatattttctaatttcccatttgttcaagagtatgttgttgcatttccacatatttgtgaattttccaattttccttctaatattgatttctggtttcattccattgtgattggaaaaggtacttggtattatttcaatcttaaatgtgataggacttgttttgtgatccagcatgtgatctattaaaaaaaaatgttctgtgtgttcttgggaaaaatgtgaattcttctgctattaggtagaatgttctgtgtatgtttatcaggtccatttggtctatagtgtcgatcaagccccttgttaactaattgatcttttgtctagatgttctaacctttattggaactagggtattaaaatcctctattattatcatgttgctgtctatttctcccttcagttctgccaatgtttgcttcatatacttaggtgttctgatgttggtgcatataaatttatcattgttatatctttctggtgaattgaaccttttatcattatatgatgtctttctttgtttcttttgacaatttttgatttaaagtctgttatggtctgaatgtccccaaaaattcatgggttgaaacttaatccccattgtggtggttttaagaggtggagcctcttgggacgtgattaaataatgaaatatctgccttcatggatggattatagcctcatcaaatgcctagacagaactagcttaggcccttttttctcttctactcttccaccatgtgaggacacagcaattcatctctttttgtccttcttccaccatgtgaggttacagcaagaaagccttcacaagacttgaatgccagaacctttgacttcccaatctccatagctgtaagaaatcaatttctgttatttataaattacccagtttcagatattttactacagttgcacaaacagacgaagataaagtctattttatcttttgtaggtatggctactcctgccctcttttggttatcattcgcatggaatatttttccatccttatactttcagcctatgtgtgttcttaaatctaaagtgaatcttgtagacagtgcatagttggatcttatttttttaaaactcattcaactgtgctatgtcatttgggcagcttagtccatttatatttaaagtaattattgatagaaaaggggttactatcaacattttgaaatttgttttttgtgttgtagctattctgttgctctttttatctcttgctatcttcctttgtgtttcatggattttttatggtgacatgattttatacctttcttactttcttttgtggaaattccataggtattttctttgtgctcactgtgggacttacataaaacagcttatagatataactatctttttaaagccgataaaacttaaattcagcttcatataaaaactttgcttttacttccccccccccacagttatggatgtcacaaattatatttttaataatgtacagccattaatatatttttataattataattacttctatgcttttgttttttttaacttttataccagaattaagtgatttacacaatactgttacactattacagtattctgtacctgtctatatatctatctttaccagttagctttatactttcatgtttttgtattgctgtttagtatctttccatttcaacttcaaggactctctttagcatttcttgaaaggcaactctagtgatgatcttattctgcttttgtttgtttaggaaagtctttatttctcatttttgaaggctagttttgccagagagagtattcttggttggctggttcttttctttcagcacttttaatacctcatcccattcccttttgtccttcaaagtttctgctaagaaatccattgctaatcttataggagtgtccttgtatgtaatgaactgcttttctcttgttgctttcaaaattctctttttggctttcgacaatttgattataatgtgcttcagtgtctatttgtttgggttcatcttatttaggcctattgggcttcttggatctgtagtccattttctccctcagatttgagaagttttcagccattatttctttaaatgagctctccaacccttctctttcttggactgctctaatagatatattggtacatttgatggtgtccaataagtctctcaggctttctttacttattttctttgttgctatttttattgttcctttttgctcctctggataatttcaaatgacttgtaattgaattgctgattatttcttctgcttgatcaagtctgtagttgaacccctctagtgaatgttttagttcagttaaaattgcattctttggctccaaaatttctatttggttccttttaatattttctatccttattgaatttctcattggttcatgcatcactttcctgaactcattgagcatcaatatgatggttatttagaattttttgtcagataattcatatacctctgtttctttaggatctgtttctggagacttattttgtttctttgacttgaccatttcccgtttcttcatatttcttagaactttgtgttggtatctgcatattaaaaaacaaaacacacaaacaaacaacaacaacaacaacaaaccagccacttcttccagtctttaccagccggctttgtactgggaaagaccttcataatctttagcctggctaaagattctggggacctctcaaacattttctgtggatacgttttctctgggcttatgcacgtagattcctaagtagagagattttctggcttctcttttttaagagttcattatctcttgctccatctgttgtctatcttctatagtgtgtgtcctccaaagtagcagcacactgtccagctctttttttttgatcttggcagcccctagtcttctagagtatgttagaccttctctgccttaagtggggctacatggaaaccagtccctttggcagccctttgaaaagccagaattctggacacatgttctatttttctcttgccctcctgaagaagagggcactgagctgtattggcctctgctgtgccacaggtcctctgaaatagcatcatgctatttagctctttggtttcttttcatggggccccaggcatctagagtatgccagtgattcaagacagacaagaaagaaaccaatcctatgggcatctccccatttccccaaaaagcaggaatattggttgcatgcttcactcttttccatgtcccctagggataggccactgaactgtatcagtctgtatctgctgtagcaagaaccctctaggacagcaatatatcacccagtatttttttgttctcagtgtcccccaggcatctagagtatggtgggtcctataaactctctaagacaggtaagacagaggctagtccctcaggcagcccccaggaaagtcagaactttggttttttgttgttgttgttgttttgagacggagcgtcgcttcttcgcccaggctggagtgcaatggcgcaatctcggctcactgcaacctccgcctcccgggttcaagcaattctcctgcctcggccttccaagtagctgggaggaatgtgccagcatgcctggctaatttttgtatttttagtagagatggggtttcaccatgttgaccgggctgatctcaaactcctgacctcaagtgatccgcctgccttggcctcccaaagtgctgggattacaggcatgagccaccgcgcccggccaaaaagtcagaactttggatatatggtctagtcttctcatttcttcttcagggagaagccaaaaactgggaatttcctcctaaccatgtggccctgtgccgagaggacagactatggtgagggtataccgtgaattttcctactggcttcagtgcagttgttttttttgctcacctagtgtgatgtagcctcttagccagcttctggatttctcacaaaaggaattggtctgtgtatagttaagttagtgtctctctgggagggagcacaggctggggtttctcattctgccatcttgctgacgttcactgtggttttgatttgcatttccctaatgactagtggttttgagcacattttcatgtgatattggccatttctatatcttccttgaagaaatgtctgttcaactcttttgcctactttttaattgtttgttgtttcttctgcaaagttgtaggagtttttttaatcatatattctggatatcaatccctaaacatttattgttttaaggaaataaattttgagataatttgttatacagcaatggataactaataaatactaaaaactcctaaatgtatatactaaatatattaattagaaaattgtaatataaaaatactaaaagctaaaactgtctgatattaggaagataattttactacaatatataccttttttgtgtgtatgagacaaggtctcattatgttgcccaagatgttctcaaactcctgggttcaagcaatcttcccacctcagcctcctgagtagccaggattacaggtatgtgccattacagccagctttcacagtgtatacttgatgtactattaatgtactatttaatgactactaaaaagtttatgataacaggagaaaatgcttatgctatcttaaataaaaatttgagtgtatgcattgataccaagaaatggaaatttgagtgtgtacactgctaccaagaaactgaaaaatgacatcccatacctttaatatttaatatttataacaaatgaggtttacatggatttttttatctcatcttatttctgatgtgttatgtagttataaatactattttatttgcactcctgctctgcaataattttgaagatagataacttatattattgctgtcttcattttttaaaattctcaaatccagatgaaattatcaaagttgataaaataatcattgttctatcttcttatttgaagattaataattgtgttgattttgcttccttgctctagttagcagtgatgtcatctgctatttttaaacttccttgaaataatatatgtaatctacttctaataagtttttcttatttagcattttggtctaaactaatttataattatttagccttatttctccatgtttaacttgctttaaagctcagcactggtgttttcagccatggcttctccattttaaggctattttaattcatttattattctggaatatatccttaaataatttatttaggaaggctgtcttggtggtggtatttctgttgcagttgttgttttcttgcctgcttggtgacatatttctattgacttgacacttaactggcatcttatctaggtagataatgctaattcaaaattctgcagatattgttctgttgttttttgccatttagggttgagtaagatgccaagttgttttttgtttctctgtagtcattctgttttcattttgtttttagctttgcctttggaatttaaaatgttcaaaatgatttgtctggatgagaatcgattttcataacttttgctttgatacactaaacagtttgagtttctagatgatgcccattttaattcatacgaggaaatatcttctagtatagtttctgcttgattaattctatgtttgtctcttagggacatctattaattttataatgctgcctttttttcagacttctgtttcagaatattcgctttcatcaatgtaatccttggctatagtaggaatgaaataataaaagcagtagcttctgtctgccctccttggttatgcagtccttacagaacatctccccatctcccatccccccaccccagctcagtgaaactctccacactttggttgtggaaattggcagggttaggtggctactcactcccaatccacatccacaataaatcactttttattatcttatcaaaatctgtagaatgcctctttattctattttgttgctgcggaggtttgttttctctttctaattattttattttctaggttttttgagggaatttcaagaggggagattttttattcaggctcatcttaacgtcatgtctggaactcaagctactgaattatatattctttaatacatatagacctacgtcaatgagtttaaactgcaaggaaagggttaaatttcttcctcaagtgtggtcaaaatctgtagagaaaagaggaacagcttctcttaaagaaagttagctgggtaggtatacagtcattgccgaggaaggcttgcacagggtgaaagctttgcttctctgctgctgtaacagggactagcacagacacacggatgagtggggtcatttccagatattaggtcacagcagaagcagccaaaatggatccccagtggtgagtaataattcttattctttgcagagaagttatgagttgtgactgcagtgaaaggctgaggttgaagatggtgctttgatgtgtgtccttcacttagttcctaagtggagaagctttctttttctacaaaagatctttggcacataaaggcaagaattatttgcaatgcccaaagcagttcattggtggtagttatatatatttttaggtgcctaattttggttttgtaaatctgttattcaaatactgaatgttacagtcattgattttagtgaagaatcaggaatttttaaaatatctgcataagaatgacaaataacagggaatatgttttttgtctaccagggtcagtttggtctgagggtggaggaatgagatagagaaggtagagggagagagatcaagaaaaagaaagagaaaaaagaggtataaggagaaaatgcaaaactcagttaatatgtcataatcaggccatgggagattctgggcagggttgggtagtggaaggaggtagagtgattaaattagttaccatgtattgaacatgcatgatgtgctgggtactttactagtgctatttcattgaattttattcttcacaatgacttttggaaagacatcatcattctttttgacagatggggtaactgtggcttaaaaaacttgcccaagttcacactattcataaggggtagagctaaaatctttcctgcccgcttcgtggtgcgccagaaggtttctccatgctgtggagacttcctggaaggagtcacacccgcccttctcttgggtggtggcagctggcgccagtcactatgtatttatttatttttaattatttatttttgaaacagagtctcgctctgtcgccaagctggagtgcagtggcgcaatctcagctcactgcaacctccgcctctcggattcaaacgattctccttcctcagtctcctgagtagctgggactacaggcgcccaccaccacgcccggctaatttttgtatttttggtagagacggggtccaccatgttggccaggatggtctcgatctcttgaccttgtgatctggccacctcggcctcccaaagtgctgggattacaggcgtgagccaccgcgcacccggccgtcactatgtatttataattactgttctttgaaaatcgaagtaactttcatctacccagtgcttactggtttgagaaaaagctttgttgcttttatttcagaagattaaaatttaattttccagtaaagattccttttgctccagtggaattttgaagcgttatacttgtatgaagaaaaaaagaatttcaaaatttataatttttgtggtaccatagaggggatactacttaattatgctagcactgtctgcagaggtctaaaaaaccataggctgctgtctatattgaacttgttaagattccttttgtttcacagtgcctgaagattggtcatgaaccagtaatagccattaaacaatgtctgttctcataagagatgaaataaatacaaattaaaacaacagtgaagtatcattttttctctatcaaagagataaatattaagttttaaaaagcaagcaatcaagaaccctctatcttgctaagaagggaggattatttgtaccctagttgcgcactagtggtgatatcatctttctggacaataatctagtgatacatatcaaaagcctttaaaatgtatatgccctttaaccaagcaattcaccttttaggaatttattctaagatataataatacatgtttgtaaagttttagtgatggatatttttcttgctattgtttctaataaggaaaatcttagaaacaatttacgtgtttaaaaacaagtgattggatgattatggaacatccataatggaataccatgtaattatttaaaattccactgtagaacaattcataatgtgtttagttaaaggggaaaaatgcagaacgaacagtgctatcacttttatacatgatacatgtatacaaacaatattaatcagaaatataggtagtttgtattttctactgtgtgcttttcaatttgaatcccatctgtaggcagaaaaataaagttaaatatttaagatttaaaaaaaacaatagctggtttttttcagagaagtaaccatctagtgatgtgtgataatttataagttgtgagattccatagttagggctttagccctttgcatttatctttcttcatctcttgaatcctcttcaaaatacacccactctacccataactcattagatcttgaaaggcatgttctgatagaattttatatttagaacaggctgcagcactcttcccttattttacagaagtgattgcatggctctctagggtgagttgcatattgagagggaggacagtgcagtggctaagtggccgcacattgaagccaggctgctggggtttgaataccagttccccaacttcctagctatgtgattttggacaagttgcttaaccattgtaattcccagtttcttgtctgtaaaatgggagtatggtaatatgtcgtaaagtagttgtgagattttaatgagataatccatatcctgctaagtactcaggaattgttagtagtttttattactattactgtttggattaagaaacagaggaaaagtgatttgtccaagattatacaaccacttaatggcattactaagaacagaatggaggaaggttttttccagcagaaatgttcagtatcctctgtgcctggcaggacaaccccaagttgtgcttttgggatggaggagctgatctaaaacaagcagtacccaggacaaggccagcctccagggagtgactgatgacagtgggaagccaaatggtagaaaggcaggtgaagttaaggaaactgagagtcaacttaggagcaggaatgaagcctggagcaaagagctagtgcaagagagagcagatgactcagagctactggggcttttgtaggccaccagctatgggcttcacgggaggttaatgtggtttaaagtctcaagacctgggtaattaaatagacaaatggggtctaggtgcatgggggaattttaagtatagctttgagaagatgcctaatggggagtaataatagagaaagaagctgggtggggccagaacaaggagcccacagtccaggcatccagctatgatcatcctaaaggaacagcctaagtttgaagaatcataaacaaatagagacatgataaaatttactttaaaaaaaatcccttggcagaagaatgaaaactgatttggagtgacaaggagatcatttaggagactattggagtaagccaaggagaaatggcgagggcatgaaaccagggcagttatggtgggatcagactggagaggatgcatttaagagatattttagcaccagaattgacagaatttggtttttgacagatgtagacactgggagaggaggagagatctaagtgcatagtggcatccttcacaaaatggaaggtataggaagcagagtgggtttgcgccaggcagagagaaaagacagatggtgaattccttctctaacatgttgagtttgaggtgcctgtggagcagctggatagagatgtccaagcagacaagtagatatttaggtgcaagttcaaaaaagagggatggcctggaatgcacatgaagagtcttctgcataagtatggttgacagttgaaattctcattgtgggtcaattcagtagcagagaggttggaggattgagaggaagccaaggacagaacctggaaaaccttgacatctaaggagggagatgaggaagaagaatctacaatagatactaaggaggggctagagagactggagcagcccaggagaaaagtggtgtcatagaaatcaagtgggcctgtagtcccagctacttgggagactgaggcacgagaatagcttgaacccaggaggcagaggttgcagtgagctgagatagcaccacggcactccagcctgggtgacagagtgagactccgtctcaaaaaaaaaaaaaaaagaaagaaatcaagtggggagatggatgcaagaaagaggagaatgcattcatggaaagagcatatttaccaagctttccatgttgaacacatgagatgtgacatgaaaggtaactgtagtgactacatgttaagcgttgaattgtggctcccttaaaattcatatgttgaaatcctaactcccagggcttcaggatttgatcatatttggagatagggtctttacagagataataaaatttaaatgaggtcattagggtgggtcctaatccaagacaattgttgtgcttattgtaaggaagggaaacacacagcggaaaagcggtgtgaagacacagggcgaagacggccatccacatacaagccagagagaaaggctcgcaacagattctttcctcacaaccttcagaaagaaccaaccctgtggaaaccctaagtttggactcctggcttccagaaaaaaaataaattttttttgtttaagccaccccagtttgtggtactttgttaccacagccccagcaaactaatacacttggtgagagtgcatacagccagagaaagaagctgtgaataagtgcatcagggaggagggaaagaaaccaaaacaggattacatcacttaaattaagagtagaaacatttcacaaagcagagtgtagtcacaggtcaaattctgcagaaaggcgaagtaggagaatgactgaaaatgtcagtccagaggccctcagtgaccttgacctttgcagaacactcccagttgagtggaggcagtagactttggagagcttggaaaatggaggcagcacagatggtctcctgcagaaagtctggtgataaaatgagacctcctcactggagtaaactcacctctgctgtcggtggaaataatctggagtcaggccagccagacccagagttcttccttcctccattttaaaggttaaacagagctgaggtcaatggctcatgcctgtaatcccagtgactcaggaggcggaggtgggaggatggcttgaggcgaggagttccgttcaagaccagtctgagcaacatagcgagactcccattcctaaaaaaattttaatttaaattaaaaaaaaaggctaaccaaaaataaaatccaatactttatttttcccacccaaaactagtttgggaaggatttctggaagaaaataatttttgcagtcattttacatgttggattttgagtgcacataacatacagattctattctgtattatcagttcagaggcaagttgagatttgaggcttcgcagaggtaaagcctctggtgaatctggtgagataaagaagaaaacaagcccaagaggaatttcagggatcatttataatttacatcaataaacagaatgggaaaaaaaacccattagagtttggaatagagaagtattaaaacactttcttagaaagctttgagtcaaaattaatctttctgtagtggcaggaatatgataagccaaacaaccctaatgtcacagctctatattattaggtgtcgaatcagatttgcactaaaacatcaagtaaaaataaaaggaatgaacatttggttaagtgaaccaattagtcaatacacgccagaaaatggtaaaactggataaacctaaaatactcaactacctagattaatcaaggccaacctagattatcaccccaatattacaactattttcaaccaactaaacaataaatctttatcaagagcctgatagtttaaggtactgtgatgaatacaaatgaaattgctgatactttttttcaagtctatttagaaatagaaacccacaattatgaaatgacaaaaacaattaatgcagttaataattcagtaacttttaaaaagaaataaacatgacaaaaagttcattctcaccaaatactaaagaaatgccaattcaaacaccaatgagatattttcctgtatcagattagacagtaaaacaaacaatccaatcagaaaaatgggcaaaagatataaaaagacatttccccaaagaaaatatacagatggtgaacaaccatataagagagtcaacatcatttgcctttatgaaaaaattaaaccactacctacctataaaaatggttaaaataataaaagataatgacaacaccaaatgatggcaggatgcggagaaactggatcatgcatacattgcttgttgggaatgtacaatggtcaagccactctagaaaacagtttggcagtttcttataaaaccaaacatgcatttagtatatgacccagcaactgcattcttgggttttgatcccagagaaataaaagcctatgctcctgcaaaaatcagtatatgaatatttataccagctttattcataatagtaaaaaactggggaaaaaagtccctcagtgggtgaatcgtaacacaaactgtgtgtgcaagatgttaccactgaaggaagctgggtgaaggtacacaggacttccctgtacattttttcaacttcttttgaatcaataattatttaaaaatgaaaagtttaaaaagtaaaaaaaaaaaacaaaaactaaaaatgttcatcttcactaaatattaaaaaaaatgccaattcaaacacaagatattctccttttacaaattaacaatttatatggattttgggagggttgggagtaatcatgctaataagtatgcaataagaggatactttcgtatactactgattgtgggaatatgaatggggagaacatttctggaaagcaatatgtcaacaatatcaagagtcttaaaaatggttgtacaagcagacacccattctgggcactgccaatttctccatgtccttagtacattttttttcagttcattcagcatctttgttccaggcactgtgctaaacattaaaaatacaccaaagatgagtatgagtaaacatgatttctgttctcaagaatttcagttttgtggtaaatatatcaaaggtgattttttataagagttttttataacagggtgtgacgtttcataggagcatgaaggtagctgtttcctatttgtctgtaggcagtatgatgtcttagataaatgccagggttttgagctagtttggttggtatcaaataataagtagttaataaatcatcttctatttattagtggtatcactttgggaagcctattagcttcctgaacttcagtgtcctctgtaagatgaggctactaagcacttgccaatgccatgaggaatataacaatttataatggacaggaagtcctatggatataagatattttaggactcacattctttgctttaaaatctattatttcctatatttttaattgtcagagttctttagctctgccttttctgattgatttccagcagatggactcttacctataacctagaagttgctatagtagacctcctaactatagataagagaagggcatgccaaatgcagttgaatcaggtgaaagtcaagcaacaaagctgcctaaaataaattttatgtaaggtagggtgccaaaatcattaaaataaaattctattctataactgtaatcacgtaagtgctttcatgaagttgtctatgaaaactttctttttcgctttctggacttcaaatattttaagtttgcttttcatttacaaagatttttttgctcattagtaatcatgaactgtattcaaacttacacttctaattctagaagatatataaactaccattttttaattataaaaatgtttatatatcttgctttaataatttcacctctagggatctagctagttaaataacaagagctacggaaacatatttgtgcaccaaaatgtttattacattatttaatgtaatgaaaaataagaatcaacctaaataagtagaagaataggtaagtaagttaaaaatgaagttaataatgactccttaatgagagaagacaacataaggctacatacagaattgtaaagaaaataatccacagaatgtgtgttttattttggtaaatggttcctaaaactaagtaagtacatagaaagatttttttttttttttttttaaagacagagtctcactcacgttgtcacctaggctggagtgcagtagtgcaatctcagttcactgcagccttcacctcccgggttcaggacacgccaccacacccagctaattttcttgtatttttagtagagacacagtttcatcatggggctggtctcaaactcctgacctcaagtgatctgcccaccttggccttctaaagtgctgtattataggtgtgacccaccgcacctggcctaggaagaattttagaaagaaagctccatatcaggaattgagaagccggtgttttaattgagaatatatttgcacagaaaaatcttggcataaatattggtttacaaaacaaacaaacaaagtaatgtcctttaatcttggatcaggagctgcccaacaactccaaaaagtcagctcatgcaaaaccatccaaggacagatgaatcagccaaacaagagagaaaggggaagggaaagtgtcttttcacaggcagcttttgaggcagtgcataaaccatgcctctgcaccatccagaccagacagttgtgacacagggttgacaaagcaggacaacgaagggtagctgctcctaaggtggggatgatgctggagcaagggggagcaccaagaggaaaaaaaaaaagcataaaaataagatagcatagtaaaaaataagatagtcatagtagttacctcttgattgatgggattatggaaatagggttatttctttgactaaaattgccagatcttcagtacaattacattgctctgctgagcaggatgaaatcaagttgaaaagtaatctagtagtgaggtacagcccgtatgctgcaaatggccaacatagatcctcagatgacagaagtgagtgatgcaggcctgtggtttacgtacagctccatgacgtatgaatggcagaagctgtgtatgtccacaggcgagccccatttcaagaagtgcttctggtcaccactctgttgtcctgtgtataaggatgtggttcagaacagccaagtcttatatttcaagaggagccagaaagacaaacttaccagtgaaatcctaatatttatataatagctcaatatctggaggggctggtttggtataaatcaccagttttacctctgacctctgttaatgcatcagaggttcaggagagagtgagaaaattgtaaatggaatattttaggactattatattggggcccaggctttagtgagtcagagcgagaaagtagggggctgaaactatttgactattaatttattcaataaagttttatttaatgttggaaagatgaagatgaatcagatagaaatcctgtttagaagcttctatgggaagagatatcaccatagctaatatgtcttagcctctaaaaggaattatggcaaactatattgtatcatatatgatctcatttaatcatcataactgcaggaggtaagtagtattatccctgattttccataagtgaaaactgagtctctcttagttacatagctgacaacacaaccaggattccaaatgccagtctgatcccagagccaagctatgaacaaccatgctatatattatggcagatcagggaaggaagacattacttctagcagcaagaaacatttgtggatgaaaagatttgagcttggagagagctgtgttgagccatgtccaaaacaatttttggcaaccatacgataaaggtaaaagccagagattgaaaagtaaaagctggtggactaaaaatggtccatagacagagagtcatcaaaacaacaaaacaaaacaaaaaccttaatcataattaattgccaatatttcaaaagtctggagaattcacataagtttagatttccagctcttctggagaattagaatatctagtaacagtgtgctaataatcccacatggtaacaactggtgaatctggcagaggctgcccagcttccaatggtgtataagctctcctcttcctatgcaacctgcctgcctcatttatatgagctgcttggatgctgcagatgcttgaatctaagagctttggtctggaaagtgaggccctaacaaggaagaaggaataacctatggatcaaggagaactgggagtccagaaatgaaggttatttgtaagtctggacccagccattccaactcctttgaggaaataagattctaaggaaaaggccgtttgcattctgctctccaagatctctgggtgttggaagaaactgaattgggggagagggggaaacttgactgggggctcaatacagacatgtaaatttgaaggaaacagagagtttagatgacaggcagtagaaaagttaatgtgtccattctatggctgacccaagattctgtttccagaagacctctctggcttgttaagtgttcatggttgcaggggaaaagttagaaaaaaagaaaaacaagccaaaacccagctccttaaatgtttctaattttattttcaaacaatcaggcagagtaatccctttacacactcttcaggcattggctgagggtcccagtcaagaaccattcagttttgggggccttaagaaaaatatttcctatgattaaaggaactttggacaggttattaccttctttgagcctcagtttctttgtcacttagaaggttgaatggtttccacattctgagggtaaggaatacgagagtgaatgaagaaatatcaagtgcatagctcagagtaggaagaaagaagtgaccagggacaaggctaagaacttactcaaaaggtgcccagctgctcagcattctgtccaaaaaagggacactgacatctctccagcattctaacagcagtcacatagcattatcagctagaaatgaaaacagattcaattctatatcctgctaaaagcttgagggtcacactagctgtgtgatctttggcagctggccaaaaccctctgaaaggcagtttcctcacctataaattttttaaaaaatatttattgtgaagattaaatgaagtaatgcatttaaaatacttagggtgccttagagttccagcacagttcgtagctcatagtaatcagttaatagatattgactttaataaatagatacttaactgagcctccaccctgggcctgttactatgctaagtaccaggagtgcaaagggaaatgaaacacgttccccaaacttgtggaactcagagcaggccaactatatgagtagtagatttttaacacgatgaggaaactgttataatggaaaaataaatagtgtgaagagggactaaggaagataaagatatggtgaaaaaaagagggttcaggctccaactgtggcatgatctagatctgcaaggaagagtagagaattgcagtagagaaagcagggaagacattccaggcagaagaaacagcttccacagaggtaaagaaggcaaaacgttttcaaaggttctaggggtgggggatggtggggaagatggtcacggaatagtgaatggttcaagtgaaactgttgtatgggttgtgagggcagttttatgggttgggtgataaaatcagaagagaaaaattgaattcacgctttgaaaggccttgtgtgtcttgctgagaagcgtgaacactaactcatgaggagtaaggcgcgggtctttaaaggaaggaagtttcataatcaaattgttttccatgaaagataatgaagggagccagccacaaggctgttgcaatcaatcgtccaaacaagaggtgacaaagactctaaaactggccaccaatgaattgaaagtggatggtgaggaagaaagaatacagggtgacataaacacaatatgtaaaatccaaggtatgaaaatggcctggtcccttcgtccttaccacagtcatcccaagagaccaaaacaaaaacacagaaaatctcttttaaaaataatctcttttgtttgtatgcaaataggccatccacagtgaaaatgcaactcaaatgcaatattttatctgcagtccaccaaatgcaaagatcaaattggtttacaaatgctgtccttcttaaaaattccaactcctcacattaaaactgtagccagctagtgcaagttaagattgtttgcaatcttaaataagatttgagtaaagctgaaattgagacacttttcaaaagaggccatcccttactcacattgctgaagagtagaaagattgacaccttcttttatcagaaaatttctttcagggagtaatgcctcttgtgtggtggcagacccttcaagtcttccagataaagcatgtgatggaagtagcagggagctgcaaaaattgcaactctatgattctgcatcaccgacttgaaaactacaagcccaggttgacaaatgtacattttaagtgttcagagaagtcttaagtgccttgctttggtcacaaagttgccacagggaagtaagtttttgaatgtgcagtgccccgtccccagctctgttgtgaaatggaaactttaaaaaaaaaatcactgatttaaaaaaccactggttttgttttttaacaagtttagtcatattgcctgtgttctatataccccaatctattttattttactttgtagtgtacatttaatttatactcaaataaatattttacataaggtgctttcacggaccttcatgcttccctaaatattaaatatgctgcccatttgttaaaatgtgttagttttgttatgtattatatcccttcccctgcacacatagaaaaaaaaaatatgaacttaaccttcaagcaagttttacgtttagaatattacctcattttatttcttctaactgaggttataaagaaaatggcaaatgtcatgtgctttgtaaagaaatgacagtttctcagaatacgtaaatgcacacccttagacaaataggccacttaaattcagaatcacagtcttttgaatattggtttaatattctcagataaagattgaaaggataacaagttttggaatcaggtgtttactttgagttctgaaaggtgacatcacaggtgttggtagtttattgatatttaatttttaaatgtgctgctgtatatatttcatttgattagaaatatgttacatagttatgttatttgttaaataatagaccatcttttgtataacctatcagaagaagttctgagattgtaagattagattgtaaatcctattgcataactagaatacagaattattaaattggaaaggaagttaaatcacttagaccgtccttcccccaggaagtcctctctacagtgttatccatgacaaatgtttatgcaggcaccctaaccatttaaaatacgaagagaaggagaagagatatatcgagaaaactattcctgagacaagagaccaggggaaaacttttcttagttgtaacctacacaactagctagaatctacctcatgctcttaagatggtgtttaatcatgaggatatcatacataactgaaattgtataatgttgaacatcttttggtggcaagtaccttgactttattaaatcagtgtaggtctcctgcattcaactatggtctctaggagggcagggaccacacttcttagctcaccttggatctcaagaccagtccaaggccttcattcagtcagagctagttaagcatttgttaattgaatgaaggaaattaaaaaaaaaaaaactagaaattccaaattgtgcaattacatctgtgaattttaaggtgttattggaaaatgggaaaaattactgagattcgaagatggataggaacaaaggtaaagcatgaaaatgtgcatatttgtgtgttgctagagtcaatagtgattgccagttcctatgcagccctggcaccacctctgaaaccttggccaacccctgccattaggtgttgagatacacgacaggcaggtgaggaaggaggggtgctctggatgtagtcttgccgctagactgtggtctttagtgtccatgtccatggggtgagttgtgagcccatcagtttcccacactacagtccttctctggcttagccttccttccctgtcctgtggtccaggttacccctggcccctgtggccttcctccagagatggaccttcctccacacacttctcaggagctcctgattctaggcatgccccagaacaccgcaactccactctgccctgtctccatcagaccagagacctcacttagaccctgggtatggggttgttggttctccacttgctgcggttgtcactagcctgagctctatcctgagctctgtccatccttctcatcttcctcattgccctttctgctaaagcaactgcacatctgaaggctatacttatccctagtacaatggtactttttctaaaatgcatacaccctaatgcttacccttttgacaattttttcctgaacctaccttttaatataagcaaattcagtcttcaattcaaataagtgtattttgctgctgaagccaccatgtgattttgagagatagtgaagacagacagtcttctgcattcacttgtagaatcctgaaaatacctcttggtgtcccttgcctttctgacttcttgcttgaagacatctagacaaaaatgtgtccctgggtcctagtttctgggttcagaaattgatcgaatgcaagaaaacaatacacattgcctcttccttagcatgcatgaatggtaggtgtgaatttgcatcatgagaaagtaaataaaagaagattccccagggcagctagggaggcagaaaaagccagcctaggatgggagtggaggacatgttagaggttatgagagtgagggtccatcctaccccacctcggtaactcactggtatggtataaatgcaaaattttggctcacacaaagaaaaatactcaacttctaatgcttaactatgtaaaatttgcttttaaagtacaagttaaaattgtatcgcccctcaaagaaacaagaaactcattacatttctaagaatgttccttcagaaacatggaactgaaagctatttttaaaaattgatctggcccttagaaaactggggccttttctttaatttacctaaggaattgacataaaagtctagggttctgcaccagaaaaatgcagaaagtgtcaaaataaaaggcagaaatacaaaaggagactttttgcagcaacgttctatgtatagcattgattccaagggtgcaacatagggaagtgaacatgtggactgtgaaattgatgctaattttctttcccactagtctagcagccctctaaaatgtcacattattaatttagttactttaccagaaatccgtgtatgtggttagcatgtgtgtttttttttaattaacagactttacttatttttagaacagttttagattttcaaaaaattgagcacatagtacgagaattcccatctactccctttgtggaacacaatttcccctatttttaccatcttgcattagtgtgatgtatttcttacgatcaagccattgttgcttcattattattattatttaaagcccataatttacattaagtttctctctttgggttgtacagttctatggattttgacaaatacacaatgtcatgtatccaccattatagtatcatacagaatagcttcactgccctaagaatcccctgtgctctgcctgttgacccttcccacccctccccaacccctggaaaccactgatctttttactgtctccacagttttgccttttccagaatgttctatctttggaatcatacagtatgtacccttttcagattgacttctttcattaagcaatatgaatttaagttttctccatgtcttttcacatcttgatggctcatttctatttattaccacataatattccattgtctggatataccacagctttaccaactgaggggcatcttagttgctaattatgaataaagtggctatacatattcacgtgtaggttttgtgtggacataagtcttcaattcaattgagtaaatatacctagaagtgtgactgctggatcatatggtaagagtatatttacttttttaagaaactgctaaactatatcccaaagtagttttaccattttgcattcttttctttattttttttttattatactttaagttttagggtatgtgtgcacaatgtgcaggttagttacatatgtatacatgtgccatgttggtgtgctgcacccattaactcatcatttagcattaggaggtaaatctcctaatgctatccctcccccctccccccaccccacaacagtccccagagtgtgatgttccccttcctgtgtccatgtgttctcattgttcaactcctatctatgagtgagaacatgcggtgtttggttttttgtccttgcggtagtttactgagaatgatgatttccaatttcatccatgtccctacaaaggacatgaactcatcattttttatggctgcatagtattccatggtgtatatgtgccatattttcttaatccagtctatcattgttggacatttgggttggttccaagtctttgctattgtgaatagtgccacaataaacatacgtgtgcatgtgtctttatagcagcatgatttatagtcctttgggtatatacccagtaatgggatggctgggtcaaatggtatttctagttctagatccctgaggaatcgccacactgacttccacaatggttgaactagtttacagtcccaccaacagtgtaaaagtgttcctatttctccacattctctccagcacctgttgtttcctgactttttaatgattgccattctaactggtgtgagatggtatctcattgtggttttgatttgcatttgtctgatggccagtgatggtgagcattttttcatgtgtcttttggctgcataaatgtcttcttttgagaagtgtctgttcatatcccttgcccactttttgatggggttgtttgtttttttcttgtaaatttgtttgagttcattgtagattctggatattagccctttgtcagatgagtaggttgcaaaaattttttcccattttgtaggttgcctgttcactctgatggtattttcttttgctgtgcagaagctctttagtttaattagatcccatttgtcaattttggctttggttgccattgcttttggtgttttagacatgaagtccttgcccatgcctatgtcctgaatggtaatgtctaggttttcttctagggtttttatggttttaggtctaatgtttaagtctttaatccatcttgaattgatttttgtataaggtgtaaggaagggatccagtttcagctttctgcatatggctagccagttttcccagcaccatttattaaacagggaatcctttccccattgcttgtttttctcaggtttgtcaaagatcagatagttgtagatatgcggccttatttctgagggctctgtcactatacatctactagaatgggtaaaatccaaaaatctgacaataccaaatgctgctgaggatgtggagcaacaggaagcctcattgctccacatcctcagcagcatttggtattgtcagatttttggattttagccattctactagatgtgtagtggtatcttactgttttaatttgcaattctctaatgaggtatgatgctgaccaccttttcatatgcttatttgctgtccgtgtaccttctttggtgaggtatatgttcagatcttttgctccttattaaattgggctgtttgttcttttatctttgagttataagagttcattgtgtattttggataccagccctttatcagatatatcttttgcaaatattttttccccaatctttggcgtgtctttttattcatataatggttgatacatgtttctgctttaaggaggaagggttttaaaaatacaatttacagtagcagtaaaaataaaaatttattgcaaatgtcttatgttcactctcaggtgatgtcagggaactatggacccagcagggtttaattaaaggggagtgtcaagtcctgggggctgtggttgacaatcctcctttattggcaattgtgcagcagggctgggagtaagaagacaacccagtcctgagctgcatcacttctaaattaagaataattcaggaactgtgtttacggtgaaatcctggcccttctcacatagattatattatgcataggatatgaatttctgtccatgaatccaagtatatatgaaatcatcactttgaaaatttcctttaactcaacttaatcccactggtgagcctcaatcctgccagttgaaaaagagactgtaactgggtcatgcaggagtctccttcctttcctgcagcccagtcagaattcaagaagttcacctggtaactggaaaatgatggaagggcctcaagtccctagtctgtcctggttgccattggcacccttactatctgagcccatagtggtctgtgaagtccggcagctccctgcccccatgccacagtggggaatgagaatatctactgatgctgggccccatgagcaaagcatgctgcctttctaggcatgagccatcacacctgaggttgctaccccctcgggagcactgatggaggggcagttgggtttctactgctcacaggacccagacaaccatcccctgccctcccttcttcttgcacttcaaaagcactctcttcctctcttttcacctctaagccaccggtatcatctcttccatgggctttcacaaaagtctggatgaacctttgaacttgtatctcttctgctttcccccttgcatcaagaaagcttagaaaacaaacactaattaacgtttcaataaataatgctgctctaattatttgtggaaactattctgtattagaactaccatcagcaccgcctcctagagtgcttttagacttgaccactggccgcaggaggccacttccatataacaacaaacagatggctgaaattggaaaactcagctaaatgttcagatgtttctagactcccacgggtttctggctctggcacatggagtagatcctgactgtgtggtcctcaggggactctctctggtgaagtttggtgaggtcaacttccacacccacacacaccagctactgtgtgtagcctgtcctcctctggttgcttctacttgcagccttggcctcttcagtcctgagagcgttggagaatgaggcagtggaggaagcagccccacacagaaagcagtttctgaagtaacctcagcaacttcctcctcaccaaacacaaggaactgatcttctccactgggctcggcctctggtcagccaaggacaacactgttgaccaccatcacggttggccccactccacccttggctctgatgacatatgtgggagtcagaggaattttgattggctgactgctggcctgtcacacaaacaagatggggcaagggggttgcgatatgacttgacatgtgaaaaaaaaaaaagccgtggtcagcaaccccctgcaactgttgaaaggctaattcaatctctgactctttaacaaaagtgatcttgttcactgcctgttctgccctgagagccttctctgctaggaggtaggttgactgactcagggagaagggtgctggtggcagagctgccaatgggtgagggtcctagagactatcgacatgaggggcagttgagaacactgtagtatttagctgagaggagagactattaataaaatttacaaaatcagctttcagctatttggaagggtttatataaaaggataaaataatatgttctggtagttctagaaaacaggacagagacaagtagctggtacttatggattggaggagtgagtggcagtagtttggggattatttataaaaaagacatttttctgttaactctcttttctaatagtgaatttcccaacctgacaagtaagaaagcacaggctagacacgcatctgtcatgacactgaaggggtccttgcttgagtgagagactggaatgatgagttttgaggtcccttacagtccagcaactctagctaagttggagaataagagaattccatgacaccatatcaccccctcatttctgctgcctgcctcaccattcatctctctttactccttttaatatcattctacgttacagcattggaggaggctgctctaaataggaactgaaataagtagattaaagaagtgctatggaagggaaaacaataaaacaacttgttttttaagagcctactattgccaggatctgtgctaagcaccatatatatgccatgttatttaaccgtcatgacatgcctatgagatatttagtattacttctgtgaggaagccaaagctcagagaggttaaataactgccccaagaacacacaggcattaagtagtggagcagggtttgaacacaggtctctatgactccaaagtgcagtgtgatatgttatttttactgatctgtttatggaaaatgatactgctttctaatttagtattaacacaaagatttttttctaaatagatttacttaaagtatgttataaaaatactatataaataatgaaacagattttacatgagtatgaagtggtactagtagctagaatgatgaaagtttggggaatactactccaaatattttgatagctagcctttcaatttagcctgtcttatatttggactgctgagtacaaggaaaagaaggaaacatgaaaattaagtgaaatatgagttacttcccctgtgctctgataggtgggtaattgatcatatgtcacaataagaaaatcaaatgaaccctttcaaacaacagcaaaatctgtgattgtaaaatccagaggaaaaccccaggtgggatctatctgtatgaaggatgaaatttccaaggtctgaacatagaatggctgagaggaagtgatgaccctgtgagtcaagaccctggaccctgggggagccctgtgggtttgagaagccctgggtgaaaggtgaagggttttacaggcctgtttacagacctctgtagtgacagaagggagatctttgtgcaaaggtcaaagtaagaattgggaaagtctgaaaagaaaacaggaaagtaataatgaagatgaaataactacttggcatactctgccacatgatttacaggcaaggtttcctttgtttttcacaacaatgcagcaaagaagtgattatgagtcacatttcataagtgagaagactgacattcaaacatgttcaataactggcccagggtccagtggtcaagccaggactggacttcggaccaccagttccaaacccacaccccttcccttgcaccacacgcttttgtgtggatgagcctccccaaccctgtcaacaacaaactgtcactttgtcacttttaatgtctcctgcttcacaggacacagctagcctccaagagatcagggaggcatgcccagagggtgctgcttctctcttttgaagctcaagtgccacagacctcagaggcacataaatgtcccccacactgagcagaggactttgcagtgcctgatcagggcagaaaaaggaggcatgcacctgggggaggatcacatacgagtgaaacctgtccccgctgaagcactaggtttggagaaatctactgggcatttacacacctttcccacttctgcttatgacttgtagccaaactcaagagtaccacccacttccaggaatagtgtaccaaggtaacagaaacattctagattcatacaattggggttagattaggatcatctgaaaatgaaggttgtgtatgtcaattgccttctaacaggatgggtggagagatgtacttaatgaatgattttggggaagggctagaagtgaagcacatggcctctctgccctcactcattgaaggctgtcttctgaagccccgtggagctcagtgcctgtcacatggttgcccacatttgttgaactgaactgcattttcatctatgggcttcaaaggctgtgtgtactctgggatctctgggaatctgtcagggaaggtgtctttgtcatgtttgtggatggggctccctttgggggtttcccagggctttacactcatgctccgagggtacgtttgtagtcattctcatcagtggaaatgcccacctgccggcagaagttatttggaaccaagcaagagcactgtccctggctgtggtgttgtttctctagtcagttcccctttctgtatttgagttctaccgtcagtcctggcattatttctctctctacaaggagccttaggaggtacggggagctcgcaaatactccttttggtttattcttaccaccttgcttctgtgttccttgggaatgctgctgtgcttatgcatctggtctctttttggagctacagtggacaggcatttgtgacaggtatgtttgtggaggctcagacgcctagggagtggcatgagataaagctgcaagctgcatctggggcagaaatgctgatgtgctaatggccggccagagaatgagtaaaagggattgcagagagcatgcttaaaacctctgaccatcaggtttgcttctcagattgactacattggaggtgggatattacaaaaatctgtctcttcctgccagatcccttcatctgtttttcgtgagctaagagacaaaataggcaggaaatagaaggtgccacttaccaaataattggcagctgttcttggctttggggtgctggggtctccgagcagcctctgctctagaagaagcagtccaaagatgtcagctcgcctcgcctgagtcccctgtgccagtgggaaatccagagaagggggatttcctcctcttgcagcctctctgcaatggacttacttggctttcctgtttgacctttcccttctctggtccagagacccttccccaatatttcttcccatccaagtgccccatcccaatattagccccacttggcaccagagaccaagatctaatttaaaaagaaatattcttgggtcaaaaaagagcccaagcaagtgattgaacataatgtgtttcacatacggtgaacctatttgcatttgcatttgcaaacgggcttaaaatatcatctctattaatagcaatttaaggttctggagagccaggtgaaaatagtttttgacaaagggaacttcctactccccttaaactgtaataatgaaggaaatgaactgtttatcttacatgtaacctcaatcttgggactaaggccctgtactaaaatgcgtctatttatgtgctcagacttgcagttcgtgttatgtctgctgctgcagataccgttaatattatttatgtgagctatcctgtgtataatggaagcttttataaatctctatttatttattcctaatatagttattaagtgcttgctatgttccaggtactagggacttaacaggtagcataaaagacataaggaaaagctgcactcttgttttctagcctagtggggaaatcacattaatttaatcacactaaacatgactacatagcaatagtgctttaaagggaaggaaattgttctatgtgactatatcagctgattaattaccaagcctttgcatttgatattttggttagtctattcttcttgaatttcatatgcctcttcctgggtgggggtgaggatgggattttatggagttgaggctagggcaggtagggagaaaacatgagaaagatgaagagataagccaagccagattcttcagcagaaaaatcaaggttgaaataccatgtttcaaaaatcagactgaggtgggagttgaggttaggggtccctaggccaggggattgaagcttcaaagagataaaactagagcaaaagcaagcacagagagtggcagagaggtccctgggcatttttccacagtccattctagtgctggcaatccacctttcatggccaggcaggtaagagtatttgtggggtgggagaaaggacagggccataggctgggcacacagccctttactggcccttatctctcctctcttctcctatacagtgctgtttccgaactgtacattggcttacactcgggctgaggtttgggaaataggcgccattttgaatatgtgtggaggaagaaaagtgtgtcttcagcactttccacctccccatcacggccctgagacctcaacaccgggaagcatctcgttccctatcggtcctcctttattcatggacggatatgattcctttctaagttccatgtcctttttagataaattaacttgaacctaatgcctaatggcttaaaaacaaacaaaaaaaaccctcttccttccagctagcatttgcattttaacaggggctttcaaaaaatgccttagcccaaggaatgagtaatgtgggaattccaagcagcagggtaggactggtgcacagtatggggagagaaggcccctcaagttgtggccctgaaatgttggcttcctctctttgaccatgatgctgtttctgagaaaacaagaatcaggctaccttaggggaccaggatgggcatggctcccttttagtgagttctatgagcctcatacctgacagtcagagccctcgagtggatgagcacagactagaagaagcactgtgaaactttgcatgatccttacctttttggcaaaaaggaaaaaaaatcgttctcaaattcatcaatagtttgaaatagggtgtgccttgattcagaaagtttcgattctagatacaactcggagaactaggcgtgtcttgtacacagatttgctcttgggggaccggaaaagctaaatgctatcgccatgctatgctccttcttctaggccagtgaggggaacgcattcttcattttaatatttcagttgcctacaatattggaaggtggataaaagcaccctctgctccttctaaatctgcgaagacatttcttctctgcacctactcatccttgatgcagctctcctcatgtctgtatggaaacactgtgctctcaaatgagtttcagaaagaacaactcacgaaagaaaacaagcattcggtcagaaaaatctccacaaatggggaataagggggatttgctccaaggagagactggaaaccaagtcagacataaaatccagcctaagctagaaggagacatggctggtgggagcttgaggaaaacagagctcaggatggaggacgtctccacctccagtcatgtcctctgtccaccagacaccaagaagtgttcatgttccatcgaggcagccctcacacccatcccttcctcatcatgccgactgcctctttactgcttcaggctcaccatctcaagtcgacgagcctgtaatactggctttcttgatcaccctgataccagccgtcacctcttgacaggcttattttctttaagctgtcattacaccatttttctgctcccaaactattaattccaaacttccaattttctgttaaattaaatatgaattccttatttgactttccatgccctattaggctatcttgctccttgctttacttatagaaactaatctcccattatttatccaaagacaacctctgctgcaggccagtcagcttttcttactgtcctgtaaaaattccatggtcactcctccatttccatgtgtccttaaaaactgttatttgattgtgtctcagaaagtcgtcaaagaatatataccaatgaaaagcatcaaaaaggttatacttgatgttatgtgtgtatcaaaaatatggctgaaatatttatccagtgaaactcaatcaacactaaaaagtggttctttcggaagcatcagttctttgagacccattaaacagatgcctcggatgcagggttatatattatcaggaatctgtctagggaagaattattggaagcttgcaaagcctttcaaggacagaggacgatagctaccacgttgagttctaggaaattaaccattgttattgttaaaggaagacagcgtttctcagaggaagactgttaaacagtgcagtggcccaggctaacagccctcataagtgggagtatcagaatgagtggacttaattacttaaaaccaatacagggtggaacttcatctgctataacagaaatcaactcgtgcaagttctaacatgcagggtacagttctgagaccaagtctgactcacctgtcaaagctcagctcaactattaccacctttacaccacccttccaagctgtaggagtgcttgctgttctccatgtcttctgaagccctggatcacttgtagccagctcagcagactctacccagacagggatcctttaaatgtaccatattgtctactgtgttaaaaatgagaggaactgactcagggtgagagcgatggagtgtccagatgttctcctttatttctccttattcctggaaatgtaatgagaatcttagaggtgaactgaaaagttatgagttcaaccacttactcaattcgagattcgctcctaaaatgtctcttctgtgttatcacccccactttggtttgaatagtacttgtgacagggagcttatcacctcacaagaaaatccagtcattgcttgtagctctctattaaaagttttccatcatctggaactgaaatctggctccctgtaacttttagttattggaactacttgcccttcagcaacagtgtatgtatcctcccatggaagggcccttacatatttgcagacacccagcatatacttgcaatcttttcttcttcaggttcattaccctagtccttttagttgttcttcatttgacataatttcattattcactagtgaaccttgctgcccttccccttgataaaccgaatttgtcagtgtcattcaagtataactgacctcacagaacgtgataccacaagcgatgtggtctgattagcacagagttcagtgaatgaatcctacactaggattggatgaaatttacttagccataccacactaacacttatgtgatttttatgtttactatggatagactatttctcctgtgtccacttcttcctcttacacagttgttatttcaaaactgaagtacagattcttacacttaccctcaggagattcatcatgttagtattagtctctcttttcaggctttatgaatgttaattcagctaactcatttttgagctatctgtctcattttgtgccatctgcacagcataagtttgatttctgttgcttttattagtagttttactaaatacataaaagtgaaatagtgaaacacagagtcttgtagcatccactgtgggatcagtcttttagacaagaatgatgcagttgctgagtcaaatgaataaatgaataaatcaaacaatactttgtcctcatttcccatattgatctatcaccatatcctgttaattataattctaaatatttcttgatctatccacttttcccttacttcacctgctactatcccagaccaaacagccatcttctttcactcaaacaattgcagtagccaactgattggtcttcctgcatctgtcctggcttccctatcatccatttgctacacagaaaccatggtcatcttttcaaaatgcaaatctgatgatatcagtctcagctctaatttctttggtggttcacatataaagactgaaatctttaactgaccaataacacacgtgtgatctggcccctgctcacctcttcagccttgtctttcacctgtctcttcattttggccacagggacctcctcgtaccttctctcacgtgccctcctgcctcagcgcctttgcatatgctgttccctttgccgagaactcttcctgtcaactcccaagcccttcacctacttagcacctacctattcaatctgttctgtttgcctcttggtatgttacaaactgtctccaaacttagcagcttagaacaatgaatcctttaccctctctcacaatgtttggggtcaggaatttgagcgggccttggctgatttttctgttcctcatgccatcaattgatatcacctgatgttattaagctgatggatgggctgatctggagatgcactgtccagtttggtagccactggttacctgaaatgcagccagtcctaattgagatgtgctataactataaaacacccacatgattattgaagatttggtgccaccaaaaaatttaaaatattcgttaataatttgtattctgattacatgttgagattataatatttcacatacatcagataacataaaatgtcattaaaattaatgtcacctatttctttttaatttctttaatgtgactactacaagttttcaaattatatctgtggcttgtaattgtggcttgtattgtattctttttttctgagatggagtcttactctgttgcccaggctggagtgcagtggcgagatctctgctcatcgcaagctctgcctcccaggttcaagtgattctcctgcctcagcctcctgagtagctgaaattacaggtgcccgccactatgcccagctaatttttgtatttttagtagagacggggtttccccataatggccaggctggtctcaaactcctgacctcaggtaatctgcccacctcggcctcccaaagtgctgggattacaagcatgagccaccacacctggcctgttttatattcttactggacagtgctgatctagagcaggagtcaagcagttttttctatgaaaggccacatagaaaatgttttcagctttgcaggccatgcagtctccatcatagctgttcaactcttccattgcactgcaaaagcagccatagataataatttacaatagacatagcagtgttccagtacaactattaataaaaataggtggtagccagatttggcctacaggctgtagtttgctgacccctgatctagaagatccaagattttattcatatgtctggtggcttggcagggataggtggaaggctcagctgggaccattgacccaaacagctatacagtcctctccagcatgatggtctcggggtagtgggacatcttacgtggtggctcagaactccagataaggtactcccagagagacaggtagaagctgtgaggcttcttatgaccaagctctcgaagtcccagaatatcccttgtactgtattctatggtcaaacaggtcactcaggctagcccagattcaaagagaggagatccaactctacctcttcatgggaggaggagtagccaaggatatgtgtttctttttaatctattatatcattcttcagatctcagtttaggctggtcctgttatgggctctcaaagtaccatgaacctctcttttgtagcacttgtcatagctagttttacatttctctgtatgattacttgatcactatcttgcttttctactaaactgtaggcaaccacgtgaagaggaactgtttctggttttgctcattatattcctagcaccaaacacaatgcttggttcaataaatatttgtggaagaaacgaatgaatgaatgaaccaatagcaaatgaatgaatgagtaataactgtatcaatattaatcctacatttctccatattgctgtcacgtatatcataagatactctgtcagaagccttgctaaaattcaaatatatttgattcccagtaaccttcttattttgtagttcagaaactttataaagaaggaaataagcctatcttactcttcccagtatctcaaagagggtttctgccctgagctgctcaagagggtttctgccctgagctgctgttcattctgcaaacactgctcgaatacccactgtgtgccaggtacagagagttcttctctgctgtaatctggacaggcaccagcttcccagcgtgggtttaggcttcaggtgcacactactgtgtaccgtctaagccacacctagaagagctctggggaaatatgactacttgggcagaaaaggaaggaactaagaagaggtatctttgtgtctgaggtctgaaggagcgtgtgggctcttgttcaggcaaagggcaggatgaggggaggtggggtggcagcagccagtaatggggtgggacagcggaatgcagaggatgaaacttcaggtcctggtgctctgagaagtaacgctgtgcagcatgtcacacccagaggcaaaccaaggccccagggagctgatgttgcactggagctctactctcctctcagcgagctggtgacgtgccagtccagcaggcctggcttatccaaccacaagtatgaatcggcagaaggcaatgagctgggccctgagtgctgctgggctgaggccgacctaatccttcctccacagagactgtggtgtcccctgctttgctcagggtaagaactcttgtatacctcacaagaagccaaggactacctaccaccttccacactggccctggagcctgcattgtagttatttgtggacactttttcttctctttagtgccaggtgggggaccaaggcctacatgtctttacaacccctcaatctctagaacaagtctgacactgagtagatgtagcaaatgtttgcctgaaagactacctcaataaataaccttctgaggcaccagcaaacttctcagcatttttcctgatactccggttaccactaacattctacacaaagttgtgaaataagtctttttctttgttgctctccaacatctactgtggacccctcctctcacttcctgtttcatcctctctgcactcccctgtcccaccccattactggctgctgccattccacctccctcatcctgccctttgcctgaatgagagcccacatgctccttcagacctcagatacaaagataccccttcttagttccttccttttctgcccaagtagtcatatttccccagagctcttctagatatggcttagatggtccacagtagtgtgcacctgaagcctaaatccacgctgggaagctggtgcctgtccaggttaaagtggagaagtactctctgtacctggcacacagtgggtattcgagcagtgtttgcagaatgaacagcagctcagggcagaaaccctcttgatgcaaagggatactttggggccccttcttctcccaccccagtctgtctctctgagagtcctctcgattccaggagccaccatcacacctggccctaggctgtgctgctcccgtctgtctcagaggctagataacatcagagtcctttccactggctcctgtggcagagcaaaaactggttggcatttttaaacgtgctacaccagtgtgtgaaagaaacacaggctgcatgggtttaaatctcagctgtaccatttactagctgggcagcctagggcaagtactgtgacctctctgagactccattccttcatctgtaacatggggacaaataatctcaccctgttgtgagcagtaataatatgattaatcatttagccaactcttattcatgttctctgatgggccagacatacaaagtaagtgaaagtggattacggcaggtgctcttcttggtttctggagtgaacctccatttacatggaggctcctctttttagatttctgactagttcacccaccttattcatagaccttattctgtgcttagctgacagaaatctcctctcagagaatccccccggtaaattcttaggttctttcctcttccattcccctttttgctctctccctccgaaggcaagagtttccactttacaggcccactggagaaagttatggcttctggttgtggttggaggttcattcctgagggagtggggacatttctacacttcttcacggccaatgacattggagaaactggcttcctaacccagcccacaccctcgcacacacacatcacacatcatggctagaatggagagaaattcttcatatggggcacttgtacttcatgaaagaaaatcatatcaatcttgagtattttaacatcctattacagcagggtcactgataaactaagtgtccagagtgttttctaggatggtgtgtggtctccaaattaacattagtgaagcttactggaaggattgttactcctgggccaggccaggattttgaggagagatgtgtttgctgtcaccaaatccttgacagactttggcagaagtgtgttaggcttactctggatagcttcagaggacaaaactagtattgacggaaggaaggtaaggagaagcagcttctaacccaggggaagagagagtttccaaactgagaaatcaaaaatggtactgattccttgtcagggtcagtgcttctccccactgtgtgaattacaggggccatttgtccaagattccttagagcaatactgatttcatgtaattatttgaatgaaaggtgatttgttaaatttatagtaaaatataatttgatttgtgtccctgtttgtcatgccaccccagaagaaaaattgtctttggttaggtcgaacataatggttttttggtttgcaaaccatgagcgattcccatattaggtgggagttcagattcaaagggccctcttttttttttttttttttttgtagtagccagcctaatgagtaggaagttgttctcactgtcattttatattgaatttcttttattttgagtatgaccatcttttcaaatgtatgagatagttatttccagttccacatactatctgtacatttcttttgcccgcttttagtttgggtctttggcctttttcttattgatttatagaagctcttttatacatagaaaattaatactttgtgactagttgcaaatattttcagttgctgaaatacacagtaggtgttccatgtaagagctgaacagctggttcctgattgctgtctccctcccttccagccaatagatttcagagtttgggcattacctattgagccaaagctgacaccacacaagcgcagagtatgggaacagagttctctgtctgattcctgtgagcttcctcatactaaatcaccaacagcaacctacttatcacagaatatgagaattgaacaagtgttggcaaggatgtggagaaattggagctcttgttccagttgtcgatgggaatgtaaagtgatgtcgctgctatggaaaatagtgtagcagttcctcagaaaattaaaaatagaatgaccacatgatctagcaattccccttctgggtatatacccaaaagaactgaaagcagagtcttaaagagatattcatacagccttgttcataccagcattatgcacaatagccaaaaggtggaagcaactcaaatgtccatcaaaaatgaatggataaacaaaatgtagtatgtacatacagtggaatatcatttagtcttagaaagaaaggaaattcaaacacatgctacaatgtggatggcccttgaatacattatactaagtgaaataagccagtcacaaaaagacaaatactgtatgagtttacttataccctaagcagtcaaattcatggaaacagaaggtggaatggtggttggcaagagctgagaggaggagagaaagaagagttattgtttaataggtatagaggcttagttttgcaagatgaaagagttctgaagatggatgtagtgatgactgtacaacaatgtgaatgtatttcataccactgtacactcaaaaggtgaagatggcaaattttatgtgtattatgccacaactaataaagatttctaaaacttatgagatctaatttcaccgtttcctattgctaaagatcacaaattagaaaacacgttggcaaaaggtacatgaaaataagcactcttgtgttgatcagagcataaacgtataatctcataaactaataaagatttctaaataacaaagatttctaaaacttatgagatgtaatttcaccatttcctattgctaaagatcacaaattagaaaacatgttggcaaaaggtacatgaaaataagcactcttgtgttgatcagagcataaacgtataatctcaggggagaacaatttgcaactattcttcaaccctttggtcaaacgattctgcttctaggaatatagcttactcccacctgtgtgatatggcatataatcaaggttttccattgcaacaaaagattggaaacaacgttaagtatccatcactagtggtctggaaatatatatatattattgtcatccaatagaatacaatagactaatatgcaacttttagcatgaggatactcgttacatgctgatacagaataatctccaaggtagtcatatgtgtgcaaaaccgtacatagtatgctaccatttgtgcttaaaaataaaaagaaaacagaatatgggtcaatgtttttgtttagttttgtctaaagtaactttaagtagaggcaagaaactggtaacatgtaacagtgatcacccctgttacctctgtggaagaaaactagacagctaagggacaaggctgggaggcagacttgctttccactatttatcacctttatctttcaaatttagtaccatctacatttagtaccatgatctattcaaaaatatttattaaaaaaagaaaaggtatagtctagaaggaaaaaaaacataacagacacttctagcccaatgtcctgcactgggtgctatgagagcagaggaaagaaacacatatggcttctagacaacaccgtctggggcatacatttctgctattcgatcaagaatagttgtgcatcttttcctggaaagaattgatttgtttttatcaacagacctatgaatttagtggacagacctgtgaattaattcactggttaggttttcctttttacattggctgttaaaaagctataagccaaatttatgtccccctcagtgcaaattgggcagatttctagggcaagcatttagcactggccttgtccttggctctgtatcatattcctgtatttggtttgcttttccacctgtttctcatgttggtcatctttcctgtgtatggccataccatcctgaatgtgcctgatcgcatctaatgttggtcacctctccttattctttgcttccttataagccactaagcagcctttttggtgctagttagggtaagtgcgtgggtagtgaaggagggaggagggagaggaagaaagaagatagaggttataaagcaaagcatatcctttttcttggcttcatcatgtagattaagtgaattgctctcaaagcgtggtccttaggccggcagcattgtcatcaccttatgttgttaaacataaaaattcatgggtttcatcccaacttactaagccagactttctgtggttgaggcccaggaaactctccaggtgatttttactcacattcaagtttgagaaccacaggaaaacaaaaggaaggcagatttctaagcgtaaatgcaatactaaccgattgcccccatcatgcctgttatgttggtcaagataaataatactagctactgcaataatcaatccctcaaattttattttttgccaatatcacaatccattgtagatcagttgtgggagaggtgtaaagagagctgctttattagtttattaagcaaaccagatctcttccattgtgagactttgcgattttctaggcccttggacatttcctctggatcccctgctgctaagaaggcaggagagggaggaaagagaagagactttagcagccagatctggaagaaacatcttttctgcccacaattccattggctagaagccagtctcatggcctgtataactgcaggggaggctgggaaatgtgacctatcgatggagctaagagcaaaaggaaatggctttgatgaagccctggcattgtctctgcacacccgagaacccaagtgaatcccaaactccacgtccaggtcatgttttggtgaacatcggttttcagtttccttttctaatcaagttttacctttttttttctcgactctagcactatgggactgagtaacattctctttgtgatggccttcctgctctctggtaagaacctttcagctttgttaagtcctggaatcctactgtctcctgatgagtctgaccacagcaagcccaggcctgagacttggtgggttttactcactttctactgagcattgtacaagaccacatgcaaaaaagactttcctggagaagaaggaagtgttatgattgagagcagctgatggcaggcagctgggatggagctctcccccccgtgtgcttcttcctcctctgcagtctcacatcagtgagcctagatgctcagagtagggtagcctggcccatcccatggggatgggggaaggctgctgcactgaggcccctgagacttgactcttttgttccacacatattctcttctggtcttctctgaccctgtttctgtctttctcaggctcctaggaaacaactgacagaattccaaaagtctcccttcattcggagcactggctttcacgtccctgacttccctaccctctctcactcccttccctacagcccatgcacatacctcatggttgccacggcttcctgacaactatggatgttcagctaattgtgtcagctgatttatagtggagccaatgaagctgaagcttcagagccctccatttgcacaaccctttctaaatccccctcaagaccctgtgaagggccccctagcagtgtggtcacctgtcttatgctttggtaaaatttgaataagtaagatattgtaaccacaataagttatgaccactgtctccttcctctgcaacttttccctccatgccattctcctgtctggtggtgttagcagtcaggggcattttgtatttgaattctacattctttttcttaactatccaccacctcccctcaaaattttaacagcatccagcctcacaaaactcagatcttccctgtttacagttccactttgagtttcagtttcttcatctataaacaggagttggctgcggtccctgccatgtatcctgtgactcagtgtctcgtagttactcctggcccaccccttcctgctgctccttgtctccacctgcaggcctgagagggaagccaccccactaagacagggaggtgaactgagcctgaagtttggctacagcacccacaggccaccagccatgagttcacctcctccagatggccacacaccaggcccttggccactgtccccatgtctgctgtggatgatgaggagtcagggaactacaaagagatggtccctcagatccatgctggctgggataagccttttcagatttctgtttttctgcttagcaccttgagcttgtggagtccttgagtgcaaggtctgtagatgtgccagctgatcactgacttaggtaacaacagcagcttccaacccccagggcccatgacctgctaccttagctcctggggatgtgggaggtatgtgtgtgtcagagagcaaggcaagaagactctagagaacattatccagtaagattcccttctcatcccacttcttatttatttattttatttattttattttttgagacagcatctttctctgtcacccaggctggagtacagtggcacagtcacagctcactgtggcctcgattacctgggctcaagcaattctcccacctcagcctccccaagtgctagaattatatgcatgagccatcgcacatgacttattttatttatttgataaatgcatatatacacacagtcatgaatcgtttaacaacaggggtacgttctgagaaacacattattaggcgattttgtcattgtataatcatcatagggtgtccttacacaaaactagatagcatagcctgctccatacttaggctacctggcacagcctattgctcctaggctacaagcctgcacagcatgttactgtgctgaatactgtaggtgttgtaacacaatggtatgtatttttgtatctgaacatatctaagcatagaaaagatacagtaaaaatatggtgttataatcttatgggaccaccattgtatatgactgaaatgtggctgtgcaatacatgacagtatatgcatatatatatatatcccttactttgtgcctggtactgttctaagtacctcataaatattaactcatttgagcctcacaataactctctgctttaggtcttgttgttatttcccattttaagatgtggacactaaagcccagagagatgaagtaatttacccaagatcgacagagctactaagtggcagagcttggattcacacccagcaatgtagatttagcattcgttcacttgactcttctcctaactcttgtggtaaaccatgaataagtggtaagacttcttccatggggcctgaacagctttggtggataatatagcttctgcctcatccgtgttcatccagtgcctcctccccatcacctgcagctgacacctcagttgacccaagagcttgggcccaagcccttctcatcaaagtgaccagcccagctctcaagatctgggagagaaggaagaaaaatgccctggaaacacatttccagaaaacactaaactggaacaccatttcccaccaaattttctgactccgcacactgaaagtgagaaagtaaagccgagacactctatgaaaactgagttcaggtgtcacttttgcccttgatttgccattgacacttcttagaagtttcttagctcctgagaaaagagttaccaatattgaaagcaacaacctcaaatggtaaccgtttaagttttatggtggtgagagaataagtgactatatttttggcagtacaattttaaagtggaatagaaagcccatgacatcagatcagaaaataacattgccagtaattcacacacgatgaaaagcaacaaaaaatcagattctatttgaattctttcttctcagggcacacctctgcttactgggctggtgaacagtgacctagccacagggccggcttccaaagggagaaaggagatgcaattggcccacataatccaccctcaaaatgtagagctgaataattcatttcatggcatagaaatagcaatacagtgaagcaattctgtttaacttttccctccctatattttgtgtcctctgtcatggaaatttgacacagtagtatttgctgcccctgctcttgaggataaaattggatgggagtttaagactgaaacgggcacctgtggccttgcagaattaggttacagtttgtgccttgtatttacaaagcgaaaggaattcctagtgccacctgcagaggcacttctaactttcaagctctgtttgccactgtcctggcacctccatcacacttttaggctggagccagagaggtttttgaaaaatcagtagctcccacatcaggaggaagtatctttccagtttgagttttggtagctgctctctttttgtctgagggttctctgggtcctagggctttctcatttctcttgaacaacacctctagttaatttcatgtacctggagtggtagttggaatatttcttcactttaagattttttttttttttttttgagatggagtctcactctgttgcccaggctaaagtgcaatggcatgatcttggctcacggcaacccccgcctcccaggttcaagtgattctcttgcctcagcctcccaagtagctgggattacacctaccaccacaaaatacaaaaatacacaaataatttttgtatttttggtagagacggggtttcaccatgttggccatgctagtctcgaactcctgacctcaggtgatctgcccgcctcgacctcccaaagtgctgggattacagacaggcatgagccactgcgcccggcccaccttaagatttatgtaagattggctcaaaagctcattcctgtggaaaggtccactgttttcctcccaagatttttgcagatatctgcgtgggtggttacttttgactcccatttcctgctgttgttgatagccctcattaaaaccatcacctggaggtgaatagacagtcgagacctatcattcccaaagaattgtcatggagcctaatagttctattggattcacccctttatgttaagccaccatttcagtgtttttcaaaatagatatatgttatctagtagggagtatcttacccccaaattagttgattgtttcaggagggcttttagtgggttccagagaaaatgagcaatcagacaagttgatttagtggaagacagtcactgaataggatgtgtatagggttgtttgggagcaagagtgaaattggtatggaacagagaggctcccaaggcaagcagacattttttttggaagaagcaagtgtttgagagactgtggcttatttttcctttgtgagaggggagttttaataccatttccaaaatatgtaacctggtattttgtccccagaagtactgttgagatttatggaagcaaaaaactctgtcacccaggctagaggagtgcagtggtgctatcaaagcttactgcagcctctaattcccaggctcaagagatgtttctgcctcagccacctgaatagctggcactataagtacatgccaccatgcctggctagttttttttgttgttgttttgttttgctttagagacggggtctcgctttgtgcccaggctggtcttgaactccttttaagtgattatctcttctcagcttcttaaagtcctgggattataggcatggcctatctatttttatgttttataatttcttgtactttttgatgttacttcaaatatctttttaagtatcctaaatatacttatttaaattttttttgagtaaatttatctataaattattgattttatgtcgatagacattgttctctatcattaataatgttaaaaataaataaaaaaacaaaaacaagtaaatcaattaatgcttaccacaggccagtatttgatccaacactaactcaaatattcatttctttaatcctcacaacaaacctatgaggtaggtaccattattgttcctgctttttgcaagaggaaactgagacacagggaagttaagtaatttgcctatggtaacacaggcagtgagtagttgagctgagattgaactcacgctgtccagaatccatgctattagttataatagtgtactgccctatagctttctgtttcacagctacatggcattactttgtatggatgtatcattatttgttaaaccatttaacttatttccagtgtattgttcttataaacaatgaatacctgtgtacctctaattttgtgcacatgtatctttttgtagaatgaattcttaagaaattgagttgctaagtcaatgcttaagcccataattaattttcttacatattaccaactgtcctccaaaaaggttgtaccaatttagaattttaccagcagtaaattcagcagttaggacccattttcctaacactctcgcggacactgggtattaccagtattttttttaatacgtgccaatcaaatgggcaaaaagaatggtttctcactgaggtttaaattgcatttccctagttattcttgagatttttcctttcctttcttcaacaattacttattgagtgcttcatatttgtaagggacaattgcaggtactggaaatgtcacagtgaggaaaagtgacaaagcccctgctgtcatggagcttattctaatgggagatgtcaggtgctcagctgagctgggagagagagagctgagttgtcaggtgtcagaggagccaattatagcagcaaaacaaaaataaaatagttcagcttttaatctcttactacgacggtataatcaagaggctaaaatgggaggaagggcagactctgcctgttccatttccccacatagagtgagtataccagtcgagggtcaggtaatcagtgcagacttagggggtcgccttaccattgaagaagccccaaatgaaaggctctagcagttttatggacctgggggtggaggaatccaagggtggggagaattcatgaggaaaatgaggtgagagggctaggagtggaaaagtacaaagtactgagttagcgtggggaatagtgtctttagggctaggagtggaaaaaatactaggtactgagtcagagtggaaaacagtgtcttcaaggcagggagtggaaaagtgctaggtactgagtccgagtggagaaaagtgtcttctctatgatgaggaggcttcagcagaggtgcctgaagacctcaccccagagcctcagataaagagacctaagaatgagggtgcctgggctaagattgcaagtatgtgaaaaagcatgactggcgggaggctgagatcttgattgcagcccccttcagagactgccatgcactgactgtgcaccaagtctgctgtagaaagggcaacttcctcagcaaggcttgtcagattaagcctctttaattgcctgtggtcaggtctgaaaaatcacacatagatttttaatcagaacccagacatctcaggagagacagacaataaccaaacataccgtgtcatgtcatgtcatgataagtaccacaataaatataagtcagcatgagggacagaatgcccaggatgctatcttcaatagaatggttagagaaatctccctgggaggtagcatttaatgaaagacctacatgaagtgaaggagaagctatgagactgtctggaggaagaaccttctggacagagggaacaacatgagaagaggacttgagacagagtgtgtgatcttttggaggaatgtcaagggaggcagtgtggctggggagagtaagcaggggaaagaggcctgataggtactggggacccaattacatgaggtcttgtaaggccaggggaaggactttggatgtagttctcagtgtgaggggaagggatctggatatatttttcagtttggtggaaggcatcagaggcttctgaacaggaggattatgtgattggagctgtatttttaagggatcattttggcttgagaaactagacccggggacaaggacggagcaggcagatgagttaggagacaattacattagtctcctctacccttttcttaacatattggagttcagctctggctgtagtagttctagatctcctcagacacacttgtgtagagcctctgttgggtattttgggtacacaaatgattcatcttggttatacagatgatttagatgattgtagacagaagagggttgtctggtcattcccagacaggggagcattccttgagatagagtagaggaaggctgaaggggaggaagacagtacctgttgctatctagatagagacatccagcaggaagttgaatacaggtatctgaaactctagtgaaagttataggctggcaataagcacctgggagttattagcttttacttgacagttgaatccgtggggctagaggagaaaaaccaggaaagtatggagaataagaagaccaagaacatgcactcaaggttaccaaaattaaagagtgatttgagaaaattaacaaggaaatcagagattgggaaagaatagagcatttcaatgaggagagatgccaacacttgcatttgacacagcggtcaaatgagttgagatctgaaaagagctcaagccttggccatggtgtgaagtcaccaacaacctttgtcagggagtttcagtagagaggtgggggtgggaggctgggaataaaggcagcaattgctgcttactctttcagggagtttgactccaagggaaagagaaactaaaagcagtagcacaaggtttgtgtttgaagtaatggaggtgaaccaggtgaatagcctggaggccgagtgaagtgagacaggacactgcagatttggaatgtcaccagtccgcacaactgaataatttcctccagaactgctcaattgcccagttgtaagaacagatatgtagaccaaaagtagagtgtccccagggtaaattttatagagacaaaggggtgtgtttattgaagttgtggaaaggaataattacaaagacatactattgttgcattgtccaatataataaccactagccatatgtgactacttaaatttcaattaattaaaattaaataagattaaaaattcatcttctcagtcatactagctatgtatcaattgctcaatagccacaggggctggtggctatcatattgttcagcacagagacagagcatttccattatcactaagagttcttgtggaaaacactgcactacagggtctggataaagctgaggtcttgattaagttgaacaacagttgtagaaggagtaagcaagagcaaaacctggatgaataggaggttgtggacggagattagtatattgagattaagattctagggactgagctgctccaggtgaaaagtttcagggttatgtcataagaaggtggggggcagctgctgaaatagtctgcgggtgtagacctgtggagttgacaagatcaaagaaatttgaggcaaggttgttagactcattcatgaagaagtcacccaaattgttagcaagaccttgcatctaatgccaaaatcctcatttagcaaggtggtagtgacttagtagctacaagcaatgagaaagtcagacacctcaaaaggggaaggtgttgctcaaagtccccacaaagtgtgataaaacaaacagtagctggggctggagcaagtggcttcctttgggtgaagccagatttcactgaaataataacctcagggaaacagtcaatgaaggggttaaagatgtgggagagtttccttgtagtaagtaatggaatgaggctttcaaagggccaagtaaaactttggaggaagtttagtaaaagaaggaattttttttagtacagataagcataggaacataaagaagagataattcttaaacatataagatatgcatttggggatagcagccagggaacactgaagtcccagtggggtcagagacttcataaggctagcaaattacagtttttgagtggcattccaacagtagagtgtattgctcaggaagtccttaattatcctttgaaacaaattccttcagctgattacgaaggcatctagctggattcttgagcgacttgttcctgacatcatagcaacccattgtaactagacttcgaccattcctcttacccaagtgctggggaagggagagattctcaatgcttacccacctatggaatcccagtaagtccagttgctaggtggcttgaggtctggggtcataaaatggaaggcctgaagtcatttggtgatcacagaccttgagccaaactttccccatttagtcagagaaaggattagcagcatcccccatgcctggctctgtgtgagatcatggaagccagtggttggtgaggtgctatggagtataaattgcaaaatactttcagttccactcagaatggatttcaaagtgatttccaccccatggggaggagagggagtctgaggagggatggatggaaaaaaaattttcatgtcattttctgtgatccactctggagacagaggcagagattctctacaacagctgctcaaactatagctcttgttaaaatggaggttctgaatcagtaagtcttgggtggggccagagattccgtgtttcagaccagcccacatgtgacgtgaatctcattggtccatacatcacactttcagttgctaggtgaagaagggagcactcgatgagtggaagagaaagccgttgtaatctttgggagaaggggcctgggtcagcggagttagactggtctgtgagtggacagaatggatgggaaggaaagaagatactgtgaggctctacagaaaaaaaaaaaaaaaaaaatatatatatatatatatatatatatatgtaaatcaagaagacagaagcagctaaagacgaagtcatttccaggtccagaaggcacaactgacagctgagtaataacataacattgactgttaattggcagaatttttaactgtgtgtttggtttctccatcaggtcatctgtcctatattacatgacaatttagactaaaaccagtatttcctcagagacaatgctagaagcttttacagtagggggcactcttgcattacattaagagctcagcaaagaagatgcagaagcctcaggtttgccttgtaaggtgattcataaacacactaaatcttccttaggtctccctttcactgtcagggtacgcatatagattttccttcctccctccaataccggtacgcatcctctacaggtggtgcattttatacctcaagtacttcacagggtcctagtgagtgtagtgaaataggcagtgattcatatttgtgcaaactcccactgatgcctgctgtctgcttccctaagagttcaagaccaccaccaaccccttgattatgtgttctcactgggccactctgtacacagtttagtttgacaagtgcatgtcactgttatctgtccttctattccctctttcaagagaaaccacatcaatttaattactcccccacttagaactcttcaaatgaagctcctctcatctctctcatcaacccatctcctccctttcctcctcaatgtcaacatgccttcacataaatcctgaatgatgaaattttatttagaacttacactaacttcctctccaaggtggcatctaacttcatattaagtaagaaacagccttcccactctccacccccgcacttctcacccaccactgcttactttttttttttttttttttttttttttgccaagtctcaagtaattctgtaacctagaaaaggtcctacacaaaccccgtgatcattcacatttaagtagttgggtggcccacatccttcccacaaaccccaaagtgtcctcaaggactaaagcctttctctcaacccttccagcatgatgtctatggttgtaaaattgtccagggtcagtgcatactgggagcagcaagtttgtggtgcctggggtttccccaatactcccaaagcacatcctcacctgcccatctatgattcattttcagcatttcactcatgtgccttaaatggtcattgaccaccacaatccgaaaacagccatcaaatttgcccagttctctttctgatctctgaaagagcttagagaggtcactgaaaataaaggccttggttcactatcgaagtcatttctaaagcatttgacatccttggaagtgctggccatgggagcagcagtcataggggaagttctgtaaagggagctatttgaatttcaaagatgttactcaacgtgattccccaactaatgaagtataataaaggggggctataatttattaccattatcagcaatcttttcaccatagcagaccaaggaatatgtggatgggaggggaggggaaagcttttggtgatggtgtagaagttatggaacctgtaacagctacagtgatgaaaactaaaattaaggttataggaaggtaactggtgggtgaatgggttgtctaactctactggtttttccctgtcttgcaatttaaattcacagaaccacagtactagaaagacccttggaacatttagtcaaccacttcattaatcagatgaggaaactgaggctcataaagattgcagtttgtacaaggccacacatttagtcagcggtgaagcaaggacaaaggtcctaatctccagatgccaagcagatgtgcacagttccagagcttaatatcttattcttcagcatgattactgataagatagtatctgggtattgtataaagagaaatggaggttttttcccctttcctcttgtttctccctccctaatccttaaccttcttttttaggtgctgctcctctgaagattcaagcttatttcaatgagactgcagacctgccatgccaatttgcaaactctcaaaaccaaagcctgagtgagctagtagtattttggcaggaccaggaaaacttggttctgaatgaggtatacttaggcaaagagaaatttgacagtgttcattccaagtatatgggccgcacaagttttgattcggacagttggaccctgagacttcacaatcttcagatcaaggacaagggcttgtatcaatgtatcatccatcacaaaaagcccacaggaatgattcgcatccaccagatgaattctgaactgtcagtgcttggtatgtggtcaatggtgtgtgttcagattcttagccttctcagatgagactgcaaatgagttagaaaaacactggagggggacttgaggggcccaggggaaaaggggggtctatagagagaaggcagaggacagccacttctgggaagtgcatttgaagggagtgtagagtctgggagtagggaactgaaagtcttttgtactttttatagtctgcttctgaaggatcagtaaaaatctgctttggggaaaaaatagagctaattgaacaaagataatatggctaattacctatagtaaaaaccatggataatttggccatcacaaagtttatataaccataaaggcctcagatgtcttacattcattttttccttgggtccaagatttttcacctactaaatctttgcctggagctcctagcaaagcggacagctgacacatttgggttttcccttcagcctcctctaggttgcttatgagttgtttgctgccacaaccatgagcctggtagacagaagggaaaaaaacccaacaaacataacccacaaacttacaaaccagctcctctgcttcacgagaccttggaaggcctaaatgccactacagatttttttaaaactatcacacagtaaaattatttttttttgttttgatatactgttctactgattgtatagatcttgtatagatttaggtaaccgccacaggacatagagcatttctatcaccctaaaaatttccctcaggctgtcccttcatagagtcataccctgtctgcactcataacccttgttgggcatcctatagttttgtctttttgacagtgtcacataagtgaagccacacagtatgtaaccttttaagcctggcttctttcgtttagcgcgccttcgagattcacccaagttgttgcacatatcgagcttgtccctttttattgctgagtagcattttattgtttatccattcaactcagtaaaagacattgggttgtttctggtttggggctcttatgaataaggctgctgtaaacgttcatgtacaggtttttgtgtgaacataagttctcagttctctagaggaaatacccaggtgtggtattactggatccaggttaatttttgatgaaacttgaaaaggcagatcaacacctattctaaaaccatagagtaaaacagaagcaaaagtaaaaatagaatggagagctgctccctttgaaccctgtgtgatttaaactaggctgcagggctttaggaatagttaaccaagtgctaaatccgtgttttcaaaatgtggtcaggtaccattggaaatgttttaggtgggacacagataagcattttgaaaagccatgttgtatttgttttaatgtatattagaaaaactctaacttacgcaacatgtgatttcacagatcttgttaatgaagctaaacacggtctggcaattcaccttctacaggccacatagactccaagaagactgctcaaatagtacactgatatagcaaaacttataaagatgacatgcaaatgacagaccttttagtaagaatacactaaattataaattagtttgtagaacctgcaaactacctagtaactataaaagaacaagggattttttctgacagaaggcacatgacacaggtctagggactccatgccagtgatcctgaacagccagaaaagtgagaatggcaaaggcaagagaaacactgtgtttattaagatcatgtatttttccctaaaatagctggatttggccttcttcttagagtatgttatgaagacactttgatgctcatgccaaaaatcagtgttctgaatttcgaattccaaaatatccacccactcacttaccacaatcctgcttgggtttctgaaagatatgacgcagggcatctcagcaccatgaactctgtcagttcctggtgagactccagctcaattccttcctgctctcttagtctggggagctggaatgtgccccatgggacacctgggccctagagtcagaccacttctccttccaaagactctactccctggaaacagtggcttcattgtaaatctttggtgactcaattacagccctcctgtcacttagagagcacccctttgatttggataagcaggaagtaagcatggctgcaaactctattgttgaaaaataaacatgaagtcattatgtggcactcaccttgggctgagggtcacattttagacaccctgaggctcccaggtgtgccccaatgagccccagatcaagtacccagttatttgctattccctcctagatacatctaaacttagattgatttttttttatctctcttctgctttcagctaacttcagtcaacctgaaatagtaccaatttctaatataacagaaaatgtgtacataaatttgacctgctcatctatacacggttacccagaacctaagaagatgagtgttttgctaagaaccaagaattcaactatcgagtatgatggtgttatgcagaaatctcaagataatgtcacagaactgtacgacgtttccatcagcttgtctgtttcattccctgatgttacgagcaatatgaccatcttctgtattctggaaactgacaagacgcggcttttatcttcacctttctctataggtaaagctgttttccaagactatttctttcagcaggtattatacacaaatgcttaaggcagatcatccaatgtccccgacttgctaggaaacctccaactgggccattttatgacgctgttaggaaggacccagatggaggtctcctgcttctcctgagtgatgcagggtccaggaggctacgagcctatgttgcacttgaagaaatatgcttttagccctgaaactgactcagtctcttggtttacctttggatggaggattctgaagttttgatttaaaaatacaggattcctccaggctagaattctttctttgattacaacacatacatgcgcttgcacacacacacacacacacacacacacacaccatgcatacatgcagacatacaaatgatatttattgtgagtatagaaccatttgggacattattggtcacaggagtgaaaacaaaaagatatgacaccccctctgcccttgaggaccttccaatagaatcagaaccctgtaatgtgcacacatgaaaaactggatttttaaaaggttgaattggaatctaaattttattccatggaaatatctgactaaatttaaaataaaagtgactggtaatgagatttatgggcattcagaggtaggcaagatccctgagggtcagggaatggttcctaaaggaaggggtaccttgtaacatgtaaaataaattattggggttaataaatgtggtgaggaggggagggcattctggatgacaggttcccaaaactgtggtgacttccgtagctgaaaaaatttgagacagtatctgggctaagcaggtgagaggaccacagtggatcagctgtatctgacgtaagtgcaggaggtatgtcaaagaaagccttggaggcagaaatgcttgtgtgttcacaagtattcttcagggacaagttcagtggaggaaaggattgaaactaagcagtagccactaataggagcctgacattttaaagtcctggctttacccaggagggcatgtgtctatatttgactcctcttttaagaagctgtaactgcaagattccctcctggaataaaggtggtctgcatctaccctgtcccatcactgcctgtgctgaccttgacacccacatctgccttcttcttaccttgaccccttctccagcggtgatttcttggcttgccccctccagtgacatccatccaactccttgctccataccctggctttgtcacctcctttctcccagtgtcttgttgttcagatataacttggtctgtgaacagcccacggggccagtccccatgaaccaactttacaactgggccaatctcatctcctgctactgacttcttcctattcagacacttcagcctctgagaatccagtaaatggtggagccaactcgtcctgtcccagttgcttctcctgtatcctctcttggccagatagaagcctctccaagctatgcctgaagttcagtacctccttcaatgtgtaattagtttgattggtggccacaagatggccatatatgacatgccccagggccctctgttacggctcccatagtctacaaattaacaggggcttgccaccactataacctcatcatggctcaccttcctgctgcttctcaactactgttctgccaaacttcaacaggtacccccatcttcagaaatgtttcagctctagctgcctcaggaagatggggcttgcctctctgggtttcccattctatcgcttgatcagagataggttagaccctgagtcaaggggccttttttgcatgttaaaaggtagcagcctccacgttagtaagtataacccctaaccccctttactgggagtgccaaactggctcaagtggaatagactgggacagactcaaaagggattaaatatggcctgcaatgccaacaacttcttaacatcccagaaacagggcatgtgtctacaaattatagctaagctaatagatcagctggtcctaattttcctgaaatttgggattagctaccagaactgttcccaaaaatgtctttaaagtgggcgactccgttctaagttttccccacaaagcctgttttccaactccccagaaacttaggagttctcatgtaaggaagtagttcctgaaggcgtgaaggttcctcaaggcatgaagaaacatcaaaggtttttcagtagatgagatatgctgaaagccatgcagaggaaacctgctgtgacctcagtaggaaaaaactaaacaaacaagcaaatgaaaactagaggtaggggcctgtggaagctgttccatttgtccaagtgagaggtgtctggagattatagtggacagaagaatcatcacgagaggaacttcagggcctgggaactgactgcagaggggggcaggatagcaggcacggcacaaatgactgcacgtgcagagcctcagcacagacacctcacccagattccagaatcacgggccaggctgaccctcttcttcctgatcatggtcggtgttatccccacctccatgaaggcatggcagctcagtccaggcatttggccagaggcatgggctcgattcttaggtcgctgctgaggccctgagcctgggactttctatggcctcctattgtggatttcaggcttctctggccttagagccctggggagaggctggcaggtaaataaagagaagagcagctagcagaaaccttttgtaaatgactctcctggctgattgaaaatttgtggtcatttgtagagcttgaggaccctcagcctcccccagaccacattccttggattacagctgtacttccaacagttattatatgtgtgatggttttctgtctaattctatggaaatggaagaagaagaagcggcctcgcaactcttataaatgtggtgagtgagtccttgtcctccccacagactgtcactttgcacctacttcccaatcggctggctgccttccggagcttgttggctgagcctagactggcaaaaagtcaggaagttgttgggaaaaaaggttttcccttggagttttgagcctatacagactggcagtagcagataatgctgctcttggacttcaaagaaaggcgacatttctaacctctggtttacaaatgtacttctggtttccagggaaaactgattattacttgctttatctacctcacttcatgaggttactgtgacatatacataaagtaaaatggtgaaaccactcctaaatgttaaagattgtggacctggtggtgtttaagcagggatatttgctaaatgaccacaagaatcagcttctcgtctctaaaaaaatctaggtttcttatgaaataagttagatgaattattgcccattgacttataacaaacaatattaactttaactaatttctaagtaatacatatccattatcatatataccaaaaataaaataatctataactccactaataagaaaaaatgattacacaaatatttttggtgcctatctttaagatttttctgtgtatcaatctatgttgttttccataattaggattatcataagggttatttttcacaatttggataatatatgtactgtgttctaattttgttatactaaatgtagcaagacaattttcaatgtcataaatatcattctacagcatcatttttaatggctgcaagatattcccttttgtggatacaccataatttatttatttaaccaacctcattttttggacacttgagttagtccaatagttttgttattataaacaccctccccactgacttctgttataaaaatgtttcatggggacaaagtggtccctaactttataataatgccatgcctttttgtagtttggtctggttctaagctaagattggactttatctcagtaattgcctccagtagtaattagtttgattggtgctaataattaaggtaaccttctaactcacttatggtagaaagcacaagatgagtattgcctctggccagcatcttgtttttcagtatactgattttaaaatctaactagaaaatagatggatgacattagcagtcattcaatgcatcctgctgtactttaaaaataagaaattggggagcaacgatcgaatttaaataaattaacacaaagcatgtggcagagccattcaaactgccaatgtatggagtgtgctgcgagatttctatgatataaaagtataaaattcctagcacagatgtaaagacatatcatgcttgtccaggctttgacttttcaaggtgagagttttgagcttcactttctttcaacctcattgccatttaaaattagtcaaatatgaagaagtgacttacatcttgggaataagctgtttgctagatttttcttcacattagaatgatcagcttacaaatgaaacaaagaagggttggagaaaaagattaaggatgtttcttcctccatgaggcaatcagaaaaaaatcaggagactagataggggagataaagaggatatgtgtgttcacatgagagaagttagaaggtggttaaataagctctgtaggtacagatgagatggtcagattgggctgagtggcacatacatgacccctaagaatgtaatgaagaatattggtaagaaaaagttatttattcagacagtcatccatgccactgagtttgatcaaagagagaagccttgctatcactgtagggagggaggtgcaacaggtataactatgccattatagatatgatatatttgtaaatttggattctgtaacttcagcaatatctgccattgctttgtgggtactcctggcattggctatgtgataggtaaaataatgccccccacaagacgtccacctcctatactccagaacctgtaatatgttatcttacatggcaaaaggaacttcacataggtgattaaggcaccaagcttgagatggtgagattaacctggattatccaggtgggcccaatgtaatcacatgagtcagagaacctttcctagctgggatggagaaatgaactggaagaaggagagatctgaaacttgagaagctcaacccagcatttctagctttgaagatggaaggaggaagccatgagccaaggaatgtaagtagcttctagaagctggaagtggctctcagttgacagccagccattaaggaaattaggatctcagttctgcaactataaggagctgaattctgccaagagaccaatgtggaaacagcagatccctccacagagacacaagcttactgataactggtaggaatttctccaaaagtggagcttcctcctactccagtgttaatccctttctcagaggagacggtcctcaaactaactaacttggcaccaaaagtcctatccagtgttttctcattatagtttttctatgcctcaactgtatatatttacccagtttaggctgtttaaatgaataaaaaggaaatgccatagttattctagccagtttccaatctctcttctctttttttgttttgtcaaatagggcagataaggcatgagaatttataactatgaattactgtcttttcccaaacagaaatcaccctatcagcttacccattgggagaaaaactaaaatagctccccctgaaattttacttcctcatttgggtcttgtgtgactgaaatctgtatacaatgccctagcaacaacggtttttacagcttgcctccctagaacaaacctaggagtctcagctgtttcaggaatgatttcttaaaggtaaagtgcctttttcaaaagaaattattattatttttttttaattttttttttgtgtgtgtgtgagacagagcctcactctgtcaccaggctggagtgcagtggcacgatctcagcacactgcaacctctgcctcccaggttcaagcgattctcctgcctcagcctcccaagtagctgggactacaggcacgtgccaccaagcccaggtaatttttgtattttcagtagagatgggttttcaccatgttggccaggatggtctcgatctcttgacctcgtgatccgtttttaaccaacatttaaacagaaatattcacaggcttaaagactgaaagttagtgatatcatcacatttccccttcaaaatgctgaatttgtaagcaaatttaaaagtttagaatctaccttttaattgtctgctttcatttttttgacagtggctttttttgatatggtgactattttgtcatgggtataaaaggataattcattttgtgttaatctgaagacatctgaaatactgtattcaactataagtacctttttttacatttataagattctttttcaaaatttttatttgaatagttttttgggaactactgaactaaactaggtggtttttggttacatggataagttatttagtggtgatttctgagactttggtgccacctgtcactcgagcagtgtacactgcaccagtgtgtagtcttttatctctcacccctcccactctttcctctgagtccccaaagtccattatattattcttatgtctttgcatcctcatagtttagctcccacttatcagtgaaaacatacaatatttgtttctccattcttgagttacttcacttagaataatggtctctggttccatcaaagttgctgcaaatgccattattttgtttctttttatggctgagtaatattccatgagggatatttaccacattttccttatccactcatgggttgatggacatttaggttggttccttatttttggaattgcaaattgtgctgctataaacatgcgtgtgcatgtgtctttttcatataatgaattattttcctttgggtatatacccagtagtaggattgctgaattaaatagtagagttctacttttagttctttaaggaatctccatactgttttccatagtgtttgtactagtttacattcccaccagcagtgtaaacatgttcccttttcaccacatccatgccaacatctattattttttgattttttaataatggccattcttgcaggagtaaggtggtatctcatggtggttttaatttgcatttccctgatagttagtgatattgaactttttttcatgtttgttggccatttgtatattttcttttcagaattgtctattcatgtccttataaacaccattatttttaagaagaaactttacaaaaatagaacataaccagatttataaagcatctgggaactcagtcaattaagaaatagctcaagtaactgatgatgcttcacctgaaagaaggcctggagagaacagagatactgtcttcaaatatctgaagagctaccatgggatgcaaagattgagcttgatggtatgactctgaagggcatctctatgaatgaaggttatgagagggtataaggaattaagagagacttttctaacaattaaaaggtcttttaggccaggggtggtggctcacacctgtaatcccagcacttttggaggctgaggcaggcagatcaccttagatcaggagttcgagacccgcctggccaacatggtgaaaccccatttctactaaacatacaaaaattagctgggtgtggtggcaggcacctgtaatcccagctacttgggaggctgagagaggagaatcgcttgaacctgggaggcagaggttgcagtgagccaagatcacaccactgcactccagcctgggtgacagaagatcaagattccgtcttaaaaaatataaataaataaataaataaataaatagtctttaaaattgtatagaagaagtagacttctgcttcctccaacaaaggattaactgctataggaattgccctctttccataaacaactagaaagcagacaaaatatatgaaacaactgttttcagagatcggatgacagacagcagaaaactgtagtccctgagtgaaggaaagaaaaaatgagataagccctatgattgctctagtttgctgcctggagccagtgtccaggcccctctgaaggcaggggagccctgatactgaactaggaaaagacattgcaagaaaagaaaactacaaacatctctcgtgaaatgcttaacaaaattagcaactaaaatctagcaatatgttaaaagtataatacatcatgatcaagtggggtttattcaagaaacacaggtaagctcaacattcaaaaatcaggcaataacctttactacataaataaactaaaaagaaaaaaacatatgatcatgtcaatggatacaggaaaaacttttgacaaaattaatacccattcatagttttaaatggaaagaaaagctctcataaaaataggaatacaagatgacttcctcaacctgacaaaggacatctaccaaaaattcttctgttagcataatatttcatgatagaagactgattgcttttaccttaagatggcgaatgtggggaggatgtctactctctctacttttgttccacattgtactggaggtcatagccagagaaacaagactagaaaaagaaataaaagacatacagattggaaaggaagtaaaactgtcttttttcacagataatgatcatgcttgtagaaaatcctgaggaatctatcaaaaacctattaaaactgataagtgagtgtagcaaagacacaggatacaaagtcaatacacaaaatcaattatttctatatactaacaaaagcaattgtacattgaaaaaaattaatagcatttataatagcatcaaataatattaaaaacttggaaataaatttaacaaaacaagtacaaggtctatatactgaaaactatacaatattactactggagaaattaaagtaaaccaaaataaatggagacataggccatgtttatgaatcagaagactagatgttaagataaccattctctccaagttgatctatggattaaatgtaatcacaatcaaaatcctggtaagctctctaatagatactaaaaatcttactcgaaaagttatagggaaatgcaaagaatctacaattgccaaaacaattctgaaaaataagaacaaaggttaaaaatacaaaattagccaggcatggtggcgcatgcctgtaatcccagctactctggaggctgaggcaggagaattgcttgaacccgggaggcagaggttgctgtgagctgagatcgtgccattgcactccagcctgggcaacaagagtgaaactccctctcaaaaaaaaaaaaaaaaaaaaaaaaaaagaacaaaggtggacttaacctacctaatttcaatatttactatatatagtaattaatacagtgtgatattggtaaaaggacagacatatcagtcaatggaacaaaatagagagtcaaaaatagattcacactgttgacaaagctaccaaggtaattccatgcagaaaggatagtattttcaacaaatagtgttgggacaattagatatccacatggaaaaagtatgaacctagacacacacaaagtaacttatatattaagaattaaaatgaaaggacttccaaaagaaaacagaggagaaaatctttgtaaccttaagttaggcaagtcttcttagataggacacagaaagcaaaaaccatatcataaaaagataaaatggatgtcatcaatatggaaaacttttgttctttgactttgtttaaaaaacgaaaagtcaaaccacagacagggagaaaacgtttgcaaaatatatatctgataaaggacttgtatccagtatataattacatattgctactcattagtaagaagacaatccatttaataaaaggcaagaagaagagacttgaacagatacataacagaagaagatatacagatggccgatgagcacagtcacaacatcattagtcatcagggaagtacaaattaaaacgataatgagataccactgcacaccctctagaatggctaaaattaaaaggtctgataaacatcaagtgttggagaggatatgaagcaactgaaactctcatatactgctatacaacccagaaatcctagacatttaccaaacagaaattttaaaaaatttaaaaatatataaagactcatacacaaatgttcatagcagcttgcttcataataccaaacctggcattctaaattttcatcagttggcggtggtatatttatacaatgaaatactgcaaagctatagaaaggaatggactactaataatacacaagaacatagataaatttcaaaagcattatgctaagtgaaacaatccaggcacaagaagaatacacattatacaatttcatgtatatgaaatttgagaaaaagcaaaactattttaagtagattcatggttatccatgggatgggggaaaggaatcagctgaaaagcgaactattttggcttataaaaatgttctcgatcttgattgtggtggtggttacgtgactatatatattcgttaaaatcaccaaactctaaactgaaaatgattgggttttattatttattaattatacctccataaagctgattgtttttatcttttatttttattttatttcaatagtttttggggaacagatggttttcggttacatggatgagttctttagtggtgatttctgagattttgatgcacctgtcacccgagcaatgtccactgtacccaatgtgtagtcttttatccttcatccacctctctctcactcttccccccaagtacccaagtccattatatcattcttatgactttgtggcctcataaaagctgattgtttttaaatacacacatacacacataaaagagaacttccagtgacaggaagtgttcaagaatgctctatttagtaaagacagaatcacaaaaccatcagaggtattgttgagtggattcttgtggtctataaatacctccatggacacccaggttagcaacctgttggagtttacgtgggacaatagcatcatcacaacagtcagcctagagaaatttacatcccaagttgtgtcagtagcaagtccctatcaatagcaactcaggctttgtgaggtctagctggctagaaatttcccacttggccttgcccatgcaacattgtgtaatattcttagcaccatctggctagccgatttaggcatcaacatcttcaagacttcttctcctcctccttataaaccttgctttcagaaaaggattagaaactcttccaatcacaaaatgattgctaaaactaaatatattacccctcccaatggtattttttggttagccaggatagagatataagtgaaaaatctatttccagtgttagaatttaaggcacagtgagaaagggaaggcatatactttttgaatgcaagaaacttcttcccaatccccctgaaattgcatcatttgagtaactatctcttccatatataaagtcacaacaatttctctctcagtcccagaactttgaagccttttcaaactttccttcttttggtatctaggaggaatacatttttgaagattgttcttggtgtctttcaggaaccaacacaatggagagggaagagagtgaacagaccaagaaaaggtaaatcctgaccctgagacattgatgagagagaggtataatccccagagtgcctgttacttgaataggcttatgcctaacatatgttgagacctcagcaaacctgaactaatggagagggagaggaaaataaaactagttaagaactggaagaaaataacctgataatggatgacagggtatccaatgcacaatgcccagaaagcatgacaagctctgtcatggtcaagtaaaagtcaataccaaagacttcagaggtggtgaacatgggcttcatcttatctgccacagtaaccccagtacctggcacagtgcctagattagtgggcatcctacatgtgtggaatgaataaatgaagaagtggggaatgataacatgtttgcttcagcctgagcatcttagtatttgctatggccctgtttagatgttcttctgccacttctttacctcattcttcagatcttgcctcaagcagcactttcttaaaaaccctttcccaaactagaaaatgtcaacttgttacagtgtcatgtggatcccttggctttttcttaataacaccagattatgcttacatatttgtgtaattatcttattaaactctataaactagacttaactaaatcctatgaagagcagagaccataccagttaagctcatcattgtgctgctagcacttagcatggtgcctggcatatagcaggttctcaataaatgttgaaagaatgattgatgcatgatgaatacataaaagttcgtggtgatcagtcctttcacaacgtgaagctatcagatagtctgtacctctatccctcctgagaaattaagctctcaggaatatcaaggctctgactgcatacccataggatcaaagcaaccctcagtcacaagcctggtttcagagatagggtcataacccccagggtgcagagacaaccgagagtacccagcactaatccagatataccagccactgtgattctagcaacaaaactaataattccgggcacccttggacaatgagaaagggtgctgaaatcctgcctaccctgtcacactcagtttcagaaatggtctggaagagcctgcagagggcaggcagcagagaaccggcagagggcatgggaagggccaggcagaaataaagggtagctcttgaagcatagatgacagtgtagaccgtggttcttttctcttgctttctccacctttctcttcaatagtttgtttctcctcattgctgttccaatggcaacctctattctgccctatcattgaaatctagaaaaagaaagtagctcaaatgtgaaatatcacctaatcttttcttctatttctccagagaaaaaatccatatacctgaaagatctgatgaagcccagcgtgtttttaaaagttcgaagacatcttcatgcgacaaaagtgatacatgtttttaattaaagagtaaagcccatacaagtattcattttttctaccctttcctttgtaagttcctgggcaacctttttgatttcttccagaaggcaaaaagacattaccatgagtaataagggggctccaggactccctctaagtggaatagcctccctgtaactccagctctgctccgtatgccaagaggagactttaattctcttactgcttcttttcacttcagagcacacttatgggccaagcccagcttaatggctcatgacctggaaataaaatttaggaccaatacctcctccagatcagattcttctcttaatttcatagattgtgttttttttttaaatagacctctcaatttctggaaaactgccttttatctgcccagaattctaagctggtgccccactgaattttgtgtgtacctgtgactaaacaactacctcctcagtctgggtgggacttatgtatttatgaccttatagtgttaatatcttgaaacatagagatctatgtactgtaatagtgtgattactatgctctagagaaaagtctacccctgctaaggagttctcatccctctgtcagggtcagtaaggaaaacggtggcctagggtacaggcaacaatgagcagaccaacctaaatttggggaaattaggagaggcagagatagaacctggagccacttctatctgggctgttgctaatattgaggaggcttgccccacccaacaagccatagtggagagaactgaataaacaggaaaatgccagagcttgtgaaccctgtttctcttgaagaactgactagtgagatggcctggggaagctgtgaaagaaccaaaagagatcacaatactcaaaagagagagagagagaaaaaagagagatcttgatccacagaaatacatgaaatgtctggtctgtccaccccatcaacaagtcttgaaacaagcaacagatggatagtctgtccaaatggacataagacagacagcagtttccctggtggtcagggaggggttttggtgatacccaagttattgggatgtcatcttcctggaagcagagctggggagggagagccatcaccttgataatgggatgaatggaaggaggcttaggactttccactcctggctgagagaggaagagctgcaacggaattaggaagaccaagacacagatcacccggggcttacttagcctacagatgtcctacgggaacgtgggctggcccagcatagggctagcaaatttgagttggatgattgtttttgctcaaggcaaccagaggaaacttgcatacagagacagatatactgggagaaatgactttgaaaacctggctctaaggtgggatcactaagggatggggcagtctctgcccaaacataaagagaactctggggagcctgagccacaaaaatgttcctttattttatgtaaaccctcaagggttatagactgccatgctagacaagcttgtccatgtaatattcccatgtttttaccctgcccctgccttgattagactcctagcacctggctagtttctaacatgttttgtgcagcacagtttttaataaatgcttgttacattcatttaaaagtctacattttctgctttggcttcaagagtactactcaacccttgtggtctgatgttccctgctctgtcctctgaatgtacttcctttctctttacatctctatggctagaagcctctcacgcatcctgtatcttctcctcctcccttttccctaccattatttgagaaaggaggcttgtatacttctatatgtttatctcagtaataagtcataaaaaatcaagtaagaatggttgtttttgaggacaactaagaaatctggaataaggaagggaagcttacttttgagtttgtaacctgtagtgtgtaattttttaattatgtacttacatgtacattaaacaaaagcttaatgtaaaaatattccttgaaaacaccatgattataaaataaatgcatatatacacatacagcatgtgagaggagccaggaaaactctggaaaaaagaaaattacctagactctgtgagggcaggaatgtgtttaatttctctccaatggatcctcagacaactaagatagttgtctattctattgtccatctttttgtcttttgttgtatttcttaaagattccctcaactttatcttctaacttctgttgtatttttatttctgctatcatgtattcttttcagaattcttttttgttctctcaaaacatatctgtttaaagattgaatgaaatattaacatgccctttggtgagaacatccctcctttgtatattaaattctctgaactgctgtattctaagactaggggaaagaaaaagaaggttgaaagaggtcattaggcagaatagtactagctaacattatttcacatttaccatatacccgtcactcatctaaacctttaaactcattatcctatttaatcctcacaatgaccctgtgacgtaggtaatggaatattatgcccattatgctgatgagaaaatataaacacagagataagtcagagtaatttacccaacattgttaactttgtaagtggcagagctttgtaacaggcagaggttggaacagtttggagggctcagaagaagacaggaagatgtaggaaagtttggaacttcccagagccttgttgaatggctttgaccaaaatgctgatagtaatatggacaatgaaatacaggctgaggtggtctcagatagagaagaggaacttgttgggaactggaataaaggtgactcttgctatgttttagcaaagacactggtggcattttgcccctgccctagagatttgtgggactttgaacttgagagagatgatttagggtatctggtggaagaaatttctaagcagcaaagcattcaagatgtaactttcgtgctgttaaaagcattcagttttatgtattcccaaaaatatggtttggaattggaacttatgtttaaaagtttggaaaatttgcagcctgacaatgtgatagaaaagaaaacccattttctgaggagaaattcaagccagctgcagaaatttgcataagtaacaaggagccaaatgttaattgccaagataatgggaaaatgtctccaggccatgtcagaactctttacagcagcccttctcatcacaggccaagaggcctaggagggaaaaacggtttcctggccaggcccgaggccttgctgctttgtgcagttttgggacttggtgccctgcatcccagccatggctaaaagaggccaagatacagttcaggtcatggcttcagagggtgcaagccccaaggcttggcagcttcagcacagtgaacctgcaggtgcacacaagtcaagaattgaggtttgggaacatccccgtagatttcagaggatgtatgggaacacctggatgtccaggcagaagtttgctgcaggggtagagctctcatggagaacctctgcaagggcagtgcagcagggaaatgtggggttggagcccccacacagagtccccactggggcactgcctagtggagctatgagaagagggccaccatcatccagaccccagaattgtaggtccaccaaccatgcgcctggaaaagtcaccgacactcaatgccaacccatgaaggaagtcaggagggggctgtaccctgcaaagccaaagaggccaagctgcccaaggccatgggagcccacctcttgcatcagcatgacctggatgtgagagatggagacaaaagagagatcattttggagctttaagatttcactgccccactggattttggacttgcatggggcctgtagcccctttgttttggcaaatttctcccatttggaatgggtatatttacccaatgcctgtacccccattgtatctaggaagttactaactttcttttgattttacaggctcataggcggaaggtgcttgccttgtctcagatgagactttggacttgggacttttgggttaatgctggaatgagttaagactttgggggactgttggaaaggcatgattgtattttgaaatgtaaggacatgagatttgggaggagccaggggtgaaattatatggtttggctgtgtccccatccaaatctcatcttgaattgtagttcccataatctccacgtgttgtgggagggacccagtgggaggtaattgaatcatgtgggcagttacccccatgctgctgttctcatgatagtgagtgagttctcatgagatgtgatggttttataagaggcttttctgccttttgcttggcatttctccttcctatcatcctgtgaaagaggatatgtttgcttccccttccaccatgatttaagtttcctgaggcctcatcagccctgctgaactgtgagtcaattaaacctccttcctttataaattaaccagtcttgggtgtgtctttattagcagtgtgagaaggaacaaatacattaacccaggcttgaaagcaaagagtcatctctgatgactgcattcaacctttccctcagcacccactgctcaccccttcgctcctgcctcattctgttatcagtcatcactaggccaggaaagcattcctcccactttcacacccacctcttattttctcattcaggaccttttttattcataccaaaaacatgtcagtcacctcccaactgatcccagtctcctatctctcttacccttcattctgtccaacacaccaagagaaacaagaaggtaaatagtgaaaaggtctccctcacattccctttccctagccacacaactctgatctccagcttcctgggtatccattcgtagtcacagtatgcctatttttaagtgtgtgtacacacacatacacatattccccttactcaggcagatttggttttactttacactacagtctaaagaaatcagaatactcttgctaggatgattgacatcagtcttcagtgtaatccttcatattaaaaacatacatctgtatgtataagttttcattctcaccaatattctagcatcattgtggatcttataataaaagtgagattccattggattttattatgtctacctgttcacttcagaagaaaagatacttacagatatagaatccttcactgtccttagtcacaaagtttaaaacctgctccaatctgaacaagttacaccctaggtctggtgagcaacagttaccctgaagggatctcccaattcctatgtccatatagttgtctttcttgatttaccccctcactttggtggtgcatatccttcagtagcttgatccagcagctttctgagaaaggatctgtgggaaatatatttaatgaaattttatgtatctgaaaatgtctttatcttactttcctgcttaactattaataattttgcttggtataaaaatttgggttggaaattattttcattgtccatagtttccagtgttgctcttgagaaatctacaaatattctgactccttatctttttacatgaaagcttttagaatctgctcagtgttctaagattttgtcatgaaatgcctgtttgtccattgtgattaacactcagatggacttttcttctggaaactcatgtcctttcctccagggaaattttcctgaattatttcattgattatttttcccctctatttcactagtctctcattttagaatgtcagattcctgaatgttgaatctcctagactgatcctccaattttgttattttctctcctgttgcccatattttgttttttgttccatttcctagagattttctcaagtttatcttccagcctttctgttgtactttttacttctgctatcatgttttattttcagagctcctttttgttttctgaatgtttctttttgcaaggagcctgttcctaatggttgaaatattatctcttaactctcttaggatattaacgattaggttgtttgtttttaaagttttatattccaagttatttcttcctgtttgtttgctttgatctatatcatccatgttaaaggattcccagctgtctgatgatacttgactgtctgttcacaattaagagtgaaaaactaaaagtttggaggatctgagtttatggatgggtttgtcaactttagcttcatggtagagggatctggagcaagacatttttaggaaatcatttttagatcttcttttttgagctggtaatttttcagtatcttgcttggaaggtagaggtatagctgctagtattttgggagccaagtgagagaagaggggtgggtgtgagtagtgatggaacctctgcattccttattcagtatgcataaatgtacttactccatgtgtttttagtacgatagccctatcgtacttgtagcatgtggcaaagtggtttctcttcccgtgacctgattataacattgattcagattaaacattgtgaactcagtttcctaaatataccaagtacaaagtaaaagtcactaaattgtcctaacagtctactagaaatggaagaaattcagaaagcaatgaggagaaccttcccattgtatgtggtacatgagggcagagaagggagtaattcacccaacaccaaaaagagccatgaccagaactcaggttcctgatttttcagtccagggttcttcccaccccactgtgcccctctaaacttcttgttaactggaagagctggaaaatgggtgtcaacagagcataatgaaggaagatcatggactttaggtcagatagacctgacaccactacacttgactgtgtgaccttgggctaattacttaatctctgattttcagttttcttatttgtaaaatagggataataatatctacctaccttacaggatcaagggcaatccaaaagataaggattatactgtttaaaaaaggaaaggaaagaaaaataaaagagccacaacaaacaagcaattgggtagcttgtttcaacagggtgggcttgaggatggtgagtgagaattagtagtgggaggatggcaacttcatgtgaggctgatgtaggaggagttgtaggttgggctgtacatggattaacaggcgtgggcttggattctttcatataacactcagcccagaagtcttccaaacaccctgctgaaagccagaaatgctcctacaactcctcctgcatcagcctcacatgaagtcccactctcaggatctcaacttagggactgagatgattcatgctctcaccttatgcacgtggaacttttccaactttaccttctgagaccaaagccaagttcctgggacctttatctttcctttgtcaagattatttccagacaatcaataatatctacttctttgtgaagataacaggaagctcattccttactaaatataacatgaaattctaagcagttaagctgagaataaaaaggaccaaaggctcccagttaatatttcggaaagcccttgtcttgaggagcagccatgtagaggatggtttgtatcagggagggccgtgcaaattggaggcaggtataccaattaggaaacagacatagttagcctcaacaagtttggcatttctaaggagctgaactagcagaagcctcctgaaatttctagattagatcctggtgcccaggcttatcagaccaggagcagggcaaagtagacttcataacaaaagtaaactcaaatcagagggaaatggaaactaacaggagctgctttattggagatggaccacaggagctttctgcactcaaatgatatggggaaaaagaaatcctaaaatataatgttggaaaagttggatagcccaggcatagctagcagattggaaatagtattaggaatcacagttttttacttagtcaccatgttgaaaagatccttttctttagcatagacccagcacaggggtgaggtaggggctaatttctggcatgagagaccagaggcacagagtatggagcaagaagcaggagctgattgctttcagatcactaactgccaaataattaaaacattttcttaaattcatattttgcaacccagaacatatacctgaagcttattattagaacatattagggtatagttacaatgctaactggtgacacaaactagttacatgctgtttccaccagtctatctgccactttttaactacacacatcaagtatttgcccccaggtttcaggtctcaacctctgtaagaacagttgagctgtgtccacttgacggaaaaacaagtctattacactttttgtttcaaaaagtcaacccatccaatcaaataagttcctttacacatattttaaaaaacacatttactagctttcctccaattttcaatgtgtttattgaactctcttggagttacagtctgggagtatttttgagactcctgttatcaatttaaaaagaaaagaaaaggaaggaatgcttttttaaaaaacaataaatcttgttcctgtgtctaaaccagccatgcatattaacgtgtgtgacttctcagagtttaaagtgttttagctgggaaaaaatatattgtagaagacttaaagaaacaagatggcggccgggcgcagtggctcacgcctgtaatcccagcactttgggaggccgaggcgggcggatcacgaggtcaggagatcgagaccatcccagctaaaacggtgaaaccccgtctctactaaaaatacaaaaaattagccgggcatagtggtgggcgcctgtagtcccagctacttgggaggctgaggcaggagaatggcgtgaacccgggaggcggagcttgcagtgagccgagatcccgccactgcactccagcctgggcgacagagcgagactccgtctcaaaaaaaaaaaaaaaaaagaaagaaacaagatggcatagcaatgagaattttaagagttttcattctccctgagaaattacttatatggagaacttattaggagtggtttatttgcagcaggaaatacagttatgatataagaaaactcttgatcatcagggtcttaggcattagaaacactcagatgctataatcctatatctagaaaaccccatagtctcttccaaaaggctctggatctgataaacaacttcagcaaagtttcaggactcagaatcaatgtatccagggtacaaagtaacatttttatataccagtaacatcgtacataagtgccaactcaagaatgcaatcccattcacaattgccacaaaaaaaataaaatacagctaaaccagggaagtgaacaatctctacaatgagaattacaaaatactgctgaaagaaatcagagaagatacaaacaaatggaaatatatcacatgctcatagataggaagaatcagtattgttaaaatggccatgctgcccaaagcaatttacagattcaatgctattcttatcaaacaaccaatgacatttttcacagaattagaaatatctattctaaaattcagatggaattcatgcaaggcagatgagcctcaaattggggcttatcctgggagagtccttggctttgctcagtaaagaattcaaaagtgagttggtggctcatgcctgtaatcccagcactttgggagtccgaggcgggcagatcacgaggtcaggagatagaaaccatcctggctatggtgaaacccggtctctactaaaaatacaaaaaattagccaggtgtggtggctggtgcctgtagtcccagctacttgggaggctgaggcaggagaatggcgtgaacctgggaggcagagcttgcagtgagctgagatcacgccactgcactccagcctgggtgacagagctagactccgtctcaaaaaaaaaaaaaaaagtgagttggtggtggaagaaaacagctttactgaggtggcagtgttacagctctgtgactgctcctgcagagcagggctaccccatgtgcagtgtgctgagagcagtagctcaaaggcagtgctgcagtcatatctacttttaattacatgcaaattaaggggtggattatgcagaaatttctagaaagagtggtaacttctgggttgtcaggtcactgccatgaaaaggggcagtaacttgcaggtgttgccatggaaattgtaagctgacacagcacactggtgggtatgtcttatggaaagctgcttgtgccccatccctagggcatgtctcaattgagctagtcctcaatttggcctgatgtctgagcccagagtccagtcctgcctcccacttcagaatcaaaaaggagccgaaatagccaaagtgatcctaagcaaaaagaacaaagccagaggcatcacattacctgacttcaaactatcctacaaggctatcataacccaaacagcatggtactgttacaaaaacagatagaccaatggaacaggttagagaacccagaaataaagccacacacctacaaccatctgatatttgacaaaatcaacattaacaaacaatgggaaatgattctgtattcaataaatggtgctgggatagctggctagccaatatgcagaagattgaaactggactcctacgtttcaccatatacaaaaatcaactcaagatggattaaagacttaaatgtaaaacctaaaactataaaaccctagaagaaaacctaggaaatactgttctggacattggccctggcaaagacttcatgatgaagactccaaaagcaattacgacaaaaacaaaaactggtaagtgggtcctaattaaactaaaaagcttctgcacagcaaaagaaactatcaacacagaaaagagacaatctacagaatgggagaaaatatttgcaaaccatgcatctgacaaaggtctaatattcagaatataaaaggaacttaaatcaataggcaaaaaccaaacaaccccatttaaaagtgggcaaaggacattaacgaacagacagttttcaaaagaagatatacatgtagccaacaagcatatgacaaaatgcccagtatcactaatcattgtggaaatgcaaatcaaaaccacagtgagataccatctcataccactcataatggctactattaaaaagccaaaaaataacagatgctggcaaggttgcagagaaaagggaacactggtacactgctggtagcagtgtaaattagttcagctgctgtgtaaagcagtctggagaattctcaaagaacttaaaacagagctaccattcgactcagcaatcctgttattgggtataaaactggaatacaaattggaatacaaggaatacaaattgttctaccataaagatacatgcacacatatgttcacgacagtactattcacaattaccaaagacatggaatcaacccagatgcccatgaatggtggactgaataaagaaaatgtagtaaagttgcaaagacaaaaaaaaattttatatcttcttaaacctacgtaaggtacattattgtttgccccttcctcctcttcttcctccttctcctccgcaatgctgtttattgagcataccatatgccaggtactgtgttaaatagtttacatacattatcttgggaagaaaaaaaaaggctatcttgcaaaagtctaaaaagttgttttaagaagagaagggggaatcagatggaaagaagagtgaattgagatattctgagaatttagagaagaaaaaaattatgagagcagcaaaacagtgaactagtgttttgttgtattgtggcaggaggaagaggtgtgatttgagcccacgttgtcctctgctatgattcaggtataagtgatcatgaggagaaaactggtggggaaaaggaggatgctaggaaataatccatcctgaagaaagcagaatccaggcatggatgtttgattcaggaatcacggaaccattgtcaaaagtggataagtagagttttgaggaaaccagaatatatgtcactcagcttattgtctaattcatatttgacctgaagatggaggcagttctaagaaagaagatccatggatcattatgatgtcatgcacaacctttttccagccacacttgaaacaaatctactcctgggcttttccattatgtgagccaatagactgttttcttcttgctctctctctccttctctccttcaactccctttgtattccccaagttggttttgctcctcaattcaagctttccattccataaaaaaataattcctaattgataaattatagaatggaaaagtgttgaccttgctgagtccaaaggcacaatcaatattttcagcccaccctctttctctctcaggttttgttcttggctcagattttcttttcatgttgatctctgtctcctattataggaagattcctctgtgcagctgggaaaaatgaccacagatggctccagtgtatgttgtctgcagcatcttttctgttacctccagcaaaaacatccttgaggaggatgcagattgggctcatttgggtcacaagttcatccctaaagccatcaccatggccagagatttttgactttattaaaaagaccaagtatttttctcttctgctccctcccccaaatcctaggagaatagagttaacccaaaattaaataaatagaatgggggaaaggtggtataatagatattgttgtttccccacccttacctggccaaggcatccatcccccagatgctgtgttgactgttaacaacctacagttgctctctttgtaagacttgtccttgaccaaataagaaccccttcccctaattctatctttatttaaaactttattgtgttcatcatgaatttttaaattcatttttatttaatatattgcattaaaatcgtattaatcttgattgttgagtttttttactttctttcaaattttaccctgctcacttcaccctagtcctggccctggctaagaagctatactccagccctccatcacccctctagggacagacctcagccaatgattaactgatgtaggggtacaaaaggtcacccccttgcctcaaggtagggataactctgtagtagaatttgtgttccagagttgccccaggatcaggcactaaagctagtcaccagctaagaccacattcttgctttcatccttaccctgtcctgccttcctcactctcttttcttgagagtgttccacacatatcacttggataagattacctgccttaggttctgcttctagggaagcctacctaagaaagttgataccaggaagggtcctaggaagcagacagtaagtggaggattttgtcgttggattactcaccagctggataacagtaggaccaggtgctgatactgcctggatgctgcatgccacacaccaaaaagcatttttgtggcaacagaaaaggactaagacactgtgaaagtggatttttaaggcttttacctgtagtgagctgtaacgggatacaggtgcaaggggattcgctaactggtacaatatcctaggctagtggtttcagtgatctgcacattaaagtcacctgggaaacttaaaaattcctaggcccagaccacacctaagactaattacattacaatctctgggtttaggacactggcaccggtatttttagacactcccagtttattcctatgtgctgacaagtttagaaactactgcctcaggcagttggggcttgtagggtaatagtacctgcaagaaaggattgtggaattggatagctattgttaattattattgattcatggcagaaagaaaaatctcaggctcagatctattaatcaacaactttaaggccaggtgcagtggctcacgcctgtaattccagcgctttgggaggccgaggagggtgaatcatttgaggtcaggaggtcaagaccagcttggccaacatggtgagaccgaatctctactaaaaacacaaaaaattaacctgttgtggtggcaggtgcctgtaatcccagctattcaggaggctgaggtaggagaatcgcttgaacctgggaggtagaggttgcattgagctgagatcgtgccactgcactccagcctaggccacagagtgagtctcaaaaaaaaaaaagtttgttcatgtccttcgtccactttttgatggggttgtttgtttttttcttgtaaatttgtttgagttcattgtagattctcgatattagccatttgtcagatgagtaggttgtgaaaattttctcccattttgtaggttgcctgttcactctgatggtagtttcttttgctgtgcaaaagctctttagtttaattagatcccatttgtcagttttggcttttgttgccattgcttttggtgttttacacatgaagtccttgcccttgcctatgtcctgaatggtaatgtctaggttttcttctaaggtttttatggttttaggtctaacgtttaagtctttaatccatctcgaattgatttttgtataaggtgtaaggaagggatccagtttcagctttctacatatggctagccagttttcccagcaccatttattaaacagggaatcctttccccattgcttgtttttgtcaggtttgtcaaagatcagatagttgtagatatgcagcgttatttctgagggctctgttctgttccatttatctatatctctgttttggtaccagtaccatgctgttttggttactgtagccttgtagtatagtttgaagtctcaaaagaagacatttatgcagccaaaaacacatgaaaaaatgctcaccatcactggccatcagacaaatgcaaatcaaaaccacaatgagataccatctcacatcagttagaatggcaatcattaaaaagtcaggaaacaacaggtgctggagaggatgtggagaaataggaacacttttacactgttggtgggactgtaaactagttcaaccattgtggaagtcagtgtggcgattcctcagggatctagaactagaaataccatttgacccagccatcccattactgggtatatacccaaaggactataaatcatgctgctataaagacacatgcacacgtatgtttattgtggcattattcacaatagcaaagacttggaaccaacccaaatgtccaacaatgatagactggattaagaaaatgtggcacatatacaccatggaatactatgcagccataaaaaatgatgagttcatgtcctttgtagggacatggatgaaattggaaatcatcattctcagtagactatcgcaagaacgaaaaaccaaacaccgcatattctcactcataggtgggaattgaacaatgagaacacatggacacaggaaggggaacatcacactctggggactgttgtggggtggggggaggggggagggatagcattgggagatatatctaatgctagatgacgagttagtgggtgcagcgcaccagcatggcacatgtatacatatgtaactaacctgcacattgtgcacatgtaccctaaaacttaaagtataataattaaaaaaaaagtttaagcaaactgtgagagtcaaagtatctccttggaagcatttaaagacactcatttcctgcagcaggagagctgcacaactgaagatcaggttgaggattttagtaagaatttttagttgcctaaacccctcggtctgcagaagtgaccaactctcccttgttagatagagaccttctatttcttgaaggctattaagaggtatcaaacaaggcaatgctttgcaaataaagttgccagataaaatgcaagatgcccagttaaattttaatttcagataaactgtgaataattattaaattttcatgaattattacagtatcataatctcctgtatcctgtttttttattgctaaatctggcatccctatttataaggtaatacttaccctactcaggatctgccctaacctttcatctggcctccagaaacatttttaagaatggagggtgggaagagggtgagaatcaaaaaactatctatcgggttctatgtgcattaatagaaatgatgcacatagttgcatcatttctattaatgatgcaaaaagtgatgaaataatctgtatgccaaatccccaagacatgcaatttacccatataacaaacctgcacatgtacccccaaacctaaaataaaagttagaaagggaaaaaaaaatcagcaaaacctgattgaggaagtatgaggcttgctaagggaagagagagaaaatatgccaaaggagctgtaggacctggtaggaggggaataaggtttattgaaaatccagtaatatctgttatctctaggcaggaatgacagtatcaaattctatgtcagaagtgggctttacagtatcaatgggataagtgtattagtttgttttgtactgaatacctgatagaatacctgagactgggaaattcataaaaattagagatttatctcttccagttctggaggctgggaagtcccaggctgaggtgccctcatctggcaagggacttcttgctgtgtcatcccatggtggaaggtggaaaggcaagagagcacacaagcacacaggcacaaacatgcatgagacagagagagagagaagggggcaaatctgcttttatgaagaactcactctcacaataatgaacccactcctgcaatcatgacataatccatttatgagggcagagccctcataacttaatcacctcttaaagttcaggtcccacctctcaacactgttgcattgataattaagtttctaacacataaactttggaggacatattcaaaccataccacctgtttattagttattattatgtttattataattgcagatacatttctgcttaaatctatcattttattttatgctttttatttgtctcacctgttccatgtgtgttttctctttttttattgcctttttttagattgttttaaaacatactagtttttttcctccactaggtgtgaaattaaacattctctttccattatttgaaaggcttctatagaaattaccacatacaagcttaacttatggaagtctacaattaatcactatctcttattgaacaaggtccacagaacattttaatatcatttaaactccttccaacttacatattattttttcatgtatttaaatatcttttcttctgctaacaataacaacatcattattccttgatttgattcatttcccttaaatttacccacatatttactcttcactgcactttattcctttttacattacagcctttctctgtaggattattttctgcctatatacggagtatacacgttagaaattcttttagggagggtctgctgttggaaaaatctcttagtttgtatttaccctattcatgacaggtgtaaaattgtatgttggcaattattttctcagtgcattgaaggttattattccactgtcttttagcactcctcattatgaagaagccaactgacaagttgttacttctttgaaagcaatctgtcttttttctttttctttttctttttattattattattatacttttagttttagggtacatgtgcacaacgtgcaggtttgttacatacgtatacatgtgccatgttggtgtgctgcacccattaactcgtcatttagcattaggtatatctcctcatgctatccctccctctcccccctccccccaccccacaacaggccccagtgtgtgatgttccccttcctgtgtccatgtgttctcattgttcaattcccacctatgagtgagaacatgcggtgtttggttttttgtccttgccatagtttgctgagaatgatggtttccagcttcatctatgtccctacaaaggacatgaactcaccattttttatggctgcatagtattccatggtgtatatgtgccacattttcttaatccagtctatctttgttggacatttgggttggttccaagtctttgctattgtgaatagtgccacaataaacatacgtgtgcatgtgtctttatagcagcatgatttataatccttcgggtatatacccagtaatgggatggctgggtcaaatggtatttctagttctaaatccctgaggaattgccacactgacttccacaatggttgaactagtttacagtcccaccaacagtgtaaaagtgttcctatttctccccatcctctccagcacctgttgtttcctgactttttaatgattgccattctaattggtgtgagatggtatctcattgtggttttgatttgcatttctctgatggccagtgatgatgagcattttttcatgtgtcttttggctgcataaatgtcttcttttgagaagtgtctgctcatatccttcacccacgttttgatggggttgtttgtttttttcttgtaaatttgtttgaattcattgtagattctggatattagccctttgtcagatgagcaggttgcaaaaattttctcccattctgtaggttgcctgttcactctgatggtagtttctttcactgtgcagaagctctttagtttaattagatcccatttgtcaattttggcttttgttgccattgcttttggtgttttagacatgaagtccttgcccatgcctatgtcctgaatggtattgcctaggttttcttctagggttttcatggttttaggtctaacatgtaagtctttaatccatcttgaattaatttttgtataaggtgtaaggaagggatccagtttcagctttctacatatggctagtcagttttcccagcaccatttattaaatagggaatcctttccccatttcttgtttttgtcaggtttgtcaaagctcagatagttgtagatatgcggcattatttctgagggctctgttctgttccattggtctatacctctgttttggtaccagcaccatgctgttttggttactgtagccttgtagtatagtttgaagtcaggtagtgtgatgcctccagctttgttcttttggcttaggattgacttggcaatgtgggctcctttttggttccatatgaactttaaagtagttttttccaattctttgaagaaagtcattggtagcttgatggggatagcattgaatctataaattaccttgggcagtatggccattttcacaatattgcttcttcctacccatgagcatggaatgttcttccatttgtttgtttgtttgtatcctcttttatttcattgagcagtggtttgtagttcttgaagaggtcctacacatcccttgcaagttggattgctaggtattttattctctttgaagcaatagtgaatggaagttcactcttgatttggctctctgtttgtctgttattggtgtataagaatgcttgtgatttttgcacattgattttgtatcctgagagtttgctgaagttgcttatcagcttgaggagattttgggctgagacgatggggttttctagatatacaatcatgtcatctgcaaacagggactatttgacttcctcttttcctaaatgaataccctttatttccttctcctgcctgattgccctggccagaatttccaacactatgttgaataggagtggtgagagagggcatccctgtcttgtgccagttttcaaagggaatgcttccagtttttgtccattccgtatgatattggctgtgggtttgtcatagatagctcttattattttgagatacatcccatcaatacctaatttattgagagtttttagcttgaagagttgttgaattttgtcaaaggccttttctgcatctattgagataatcatgtggtttttgtctttggttctgtttatatgctggattacatttattgattttcgtatgttgatccagccttgcatgccagggatgaagcccacgtgatcatggtggataagctttttgatgtgttgctggattcggtttgccagtattttattgaggatttttgcatcaatgttcatcaaggatattggtctaaaattctctttttttgttgtgtctctgccaggctttggtatcaggatgatgctggcctcataaaatgagttagggaggattccctctttttctattgattggaatagtttcagaaggaatggtaccagctcctccttgtacctctggtagaattcggctgtgaatccatctgttcctggactttttttggttggtaagctattaattattgcctcaatttcagagcccgttattggtctattcagagattcaacttcttcctggtttagtcttgggagagtgtatgtgtccaggaatttatccatttcttctagattttctagtttatttgcgtagaggtgtttatgatattctctgatggtagtttgtatttctgtgggattggtggtgatatcccctttgtcattttttattgcatctatttgattcttctctcttttcttctttattagtcttgctagtggtctatcaattttgttgatcttttcaaaaaaaaacagctcctggattcgttgattttttgaagggttttttgtgcctctatttccttcagttatgctctgatcttagttatttcttgccttctgctagctttttaatgagtttgctcttgcttctctagttcttttaattgtgatgttagggtgtcaattttagatctttcctgctttctcttgtgggcatttagtgctataaatttccctctacacactgctttaaatgtgtcccagagattctggtatgttgtgtctttgttctcgttggtttcaaagaacatctttatttctgccttcatttcattatgtacccggtagtcattcaggagcaggttgttcagtttccattagttgaatggttttgagtgagtttcttaatcctgagttctagtttgattgcactatggtctgagagacagtttgttataatttctgttcttttacatttgctgaggagtgctttatttccaactatgtgatcaattttggaataggtgtggtgtggtgctgagaagaatgtatattctgttgatttggggtggagagttctgtagatgtctattaggtccgcttggtgcagagctgagtttaattcctgaatatccttgttaactttctgtctcgttgatctgtctaatgttgacagtggggtgttaaagtctcccactattattgtgtgggagtctaagtctctttgtacgtcactaaggacttgctttatgaatctgggtgctcctgtattgggtgcatatatatttaggatagttagttcttcttgttgaattgatccctttagcattatgtaatggccttcttcgtctcttttgatctttgttggtttaaagtctgttttatcagagactaggattgcaacccctgcctttttttgttttccatttgcttggtagatcttcctccatccctttattttgagcctatgtgtgtctctgcacatgagatgggtttcctaaatacagcacactgatgggtcttgactctttatacaatttgccagtctgtgtcttttaattggagcacttagcccatttacatttaaggttagtattgttatgtgtgaatttgatcctgtcattatgatgttagctggttattttgctcgttagttgatgcagtttcttcctagccttaatggtctttacaatttggcgtatttttgcagtggctggtaccagttgttcctttccatgtttaatgcttccctcaggagctcttttagggcaggcctggtggtgacaaaatctctcagcatttgattgtctgtaaaggattttatttctccttcacttatgaagcctagtttggctggatatgaaattctgggttgaaaattcttttctttaagaatgttgaatattggcccccactctcttctggcttgtagagtttctgccaagagatcagctgttagtctgatgggcttccctttgtgggtaacccgacctttctctttggctgcccttaacattttttccttcatttcaactttggtgaatctgacattatgtgtcttggagttgctcttctcgaggagtatctttgtggcgttctctgtatttcctgaatttgaatgttggcctgctttgctagattggggacgttctcctggataatatcttgcagagtgttttccaacttggttccattctccccgtcactttcaggtacaccaattagacgtagatttggtcttttcacatagtcccatatttcttggaggctttgtttgtttctttttattcttttttctctaaacttctcttcacacttcatttcattcatttcatcttccatcgctgataccctttcttccagttgatcgcatcggttactgaggcttgtgcattcgtcacgtagttctcgtgccgtggttttcagctccatcaggtcctttaaggacttctgtgcattaattattctagttatccattcgtctaatttttttttcaaagtttttaacttctttgacattggttcgaacttcctccttcagcttggagtagtttgatcttctgaagccttcctctctcagctcgtcaaagtcattctctgtccagctttgttccattgctggtgaggagctgcattcctttggaggaggagaggtgctctgatttttagtttccggtttttctgctctgtttttttccccgtctttgtgattgtatctacttgtggtctttgatgatggtgacatagggatgggttttttggtgtggatgtcctttctgtttgctggttttccttctcacagtcaggactctcagctgcaggtctgttggagtttactggaggtccactccagaccctgtttgcctgggtatcagcagcgatggctgcagaacagtggatattggtgaaccgcaaatgctgctgcctgatcgttcctctggaagttttgtctcagaggagtacccggccatgtggggtgtcagtccgcccctactggggggtgcctcccagttaggctactcgggggtcagggacccagttgaggaggcagtctgcccgttctcagatctcaagctgcatgctgggagaaccactactctcttcaaagctgtcagacagggacatttaagtctgcagaggttactgcggtctttttgtttgtctgtgccctgccccagaggtggagcctacagaggcaggcaggcctccttgagctgtggtgggctccacctagttcaagcttcctggccactttgtttacctactcaagactaagcaatggtgggcacccctcccccagcctcgctgccaccttgcagtttgatctcagactgctgagctagcaatgagcaaggctccgtgggtgtaggaccctccgagccaggtgcgggatataatctcctggtgtgccgtttgttaagcccattggaaaagcccagtattagggtgggagtgacccaattttccaggtgcagtctgtcacccctttctttgactaggaaagggaattccctgaccccttgcacttcccgggacaggcaatgcctcaccctgcttcggctcatgcacgatgcactgcacccactgtccggcactccccagtgagatgaacccgttacctcagttggaaatgcagaaatcacccgtcttctgcattgctcacgctgggagctgtagactggagctgttcctattcggccatcttggctccaccctctgtttttttttttatgagatggagtctcgctctgtcacccaggctggagtgcagtggtgcaatcttggctcactgcagcctctgcctccccgtttcaagcaactctcctgcctcagcctctcaagtagctgggactacaggcatgcgctgccacgcccagctaatttttgtatttttagtagagatggggtttcaccatgttggccaggatgatcttgatctcttgacttcgtgttctgcctgtctcagcctcccaacatgttgggattacaggtgtgagccaccacgcctggcctctggcttcttttaaaatcttctctttgtctttgaaattctaaagttacatgataatgtgtgtagatatggatttctttttatttatgttgtttgggctttattaagcttcttgagtcagtgttttagtgtctcttcttcatttccatttatgtcagccattcaatctttttggaggctgccattcaatccactacacttatcgttgttcttctccagtgattggcctccttaaaaaaaaaaacaaaaaaacaaaaaaaaaacttgtattgaggaagaggaacatctactggatttgagctatttccaacagaaaccaagacccataactagtatatgtggatgaacacaaaattgtgagatctttgaaaagttatcaaatcagttcctattcacattggtgttttttgtggttgtgtgtttgttttgtctaacagcaatgtgctaattttttagattatttttatggttccaataaaagagaggttttattttattcattttatccttctgtttaattttaaaaacacaaaaacagttaaagcagtttctaaaaatgcacttttaaaatagtctacagaatagtttactataggtgatgaaactagaataaaaggaaaatcaaggcaggcaaaataagttttaaatcaaaagtaaaaataattcacaaaatgcatgcaaatgtgaattaatttgggtgccagaagaaggctacaatttgaatctgtgcttcatagctggtaaggcaaagttaagaacacaatcaggtaaaatattcataaaccaactgctctggggaagcaaattctggttttgttactgagacaggaaaacaattttcccaagattttaaaaggggatgatcatgaagtgtatcagatagtgtctttaataacaacccagtattagatacaatcataaattccatgacctcactaccgaacaatgacaaaaactgaagcaactttacataggcaaaaacaatgtgatccaggataagtgctctgataatcaaactagagctaagaataaaatacaaaccatctgaagaatagatggcttgtatgtcttctatgcaatgttctgtgactgttgtctctcaaaattaaattttcaataagcattggctgatgaagaactcaaagttctattttctcacaagaacctggaatgtattttgatgttcaaccaaacaaaggaagtaatgttgccatcttcctaaaaagatgagaactctgatcaaaacccctgctttaatgtaaggatatcccccttccaaatggacacaggacaatgaaatgcttatggcagataagtatatttttaagtatttaataccataagtaatgcatataattttttttaaagctgaaacattatagagaagtgaaaagtctcctttgactaccatcttcattcctagtcctctttccctctgcagacgtgatcacagttagcaatttggtacattctttcattacttctttgcatttgcatatgtatgtatagaaaatatctaatataaagtattattttgtacaaattgctctttatataaaaatttcagtatttctattagtcacttttcccccactcaacagtgtacattggatttctaatcatgtcagtacctataaatccacttcattctatttccttctttcacaggtgaacctgtaggttgtttactaatacaaatattgttaatgactacctttgcatctgcctcattggcacaggagcgtttcttgactattagcttttgagaagtggaattgctagatggaacttttaattttttaataggtactgccaaattacttcttaaagtgattgcaccaatttacacttcttcaagtagtgtatgacagtacctgtctccttaggccctcagtaacactgaacattaacaatcttttaaaaatttttattccaaaaaaatgaaaatggtatctcattgtttgaatttgcaattccctgattattactaaagacgcactttttttttccattttcagtgatcactaatgttacctctcccactcagttttcaaataaatttatttttattttattattttattttaaaatctgagacaaagtcatgctctgtcacccaggctggagtgcagtggcataatcatagctcactgcagccttgaattcctaagctcaagggatcttccttccttagcctgccttatagctgatttcattatgcttggctaattttttaattttttatagagacggggtcctgctatgtttctcaggctagtctcaaactcctggcctcaagtgatcctcctgccttggcctcccaaagtgctggaattacaggtgtgctgtcaacatgcctggcctctcaaccatttttttagtaagttgtttgtctcttacttactgacttgtaagaattgttttattaagaattattttatacatatatataatacaagtcatttacctattatacacattgtaatcgtttacttccaatgtgttgtgtcttttgtttatggcacaatgtaaaataccaacatttttcattttggtatagtcaaattcattgatcttttcctttacttcattttagtatcttatattgaaaatacaagattctctactaaatataaatttattgcgcagaaatcagaagccacttgtgacttcctttgcctataaatcccttactgattctctcttcccacctgatccacatgatctttactatccaccctacaacatttagcacatcttctgtgagaggcagtccttgggacttcacagggtagaatggttgccattcattcatttatttattcaattaataatctttagttatcatatgccaggcacagtgctaggccttggttatacagctgtgaataaagcagacaagatttttgccctcattgagctcacagtctaatgaaaacaacatacatttaacaaatcattaaacatgtatactcatcacatactgtcaagtatgaagaaagaaaagcatagggtgctatgagagagtgggtgttggaacttccactgtgctgagctgatctccatgacagcttgcatcatactgtattctaattttccgatccctgtggctttcataccatgggccccacacattgtttgtctgacaccagtttccccagagccatcttccctgacagggccagactccaggtttgactatgcctgcctctctcttgctgctctgctgacttagcatagcatgagtcactcttgctctgagaaacaaagttctgagaaaactgagccaacaaacaggtgacagaaaaataaaactcctagcgtaagggatttggagcacgtaggggtggaaaaatcactctggagttgtcagatgaacctgatccagataaatactctgggcttggatgaacaatcagatagcaaactaaataaaagtgcattttgagtactgtttgaaacagtgatgtgtaaataccttctataccttgagaaaggccctcatagtaacaatggagatgttgtcacagaaccaaactataatatttggactatgaaaaaaacagaagatagaacattggagccaatgaatccacattttccctgtcactgccatctggaaaatcagccattataccctcagggtttcaagatcttagaagaaaccctgaaaaggcaggaacgggcctcccactgtcttccttgcacttgaggcctggcatctacagccaactctctgctccaccagctgtataatgttaggcaggtggtttacctcattgtctctgcctcagttttctcacgtgtaaaatgtgaataaataatgggcctcctagagtctttttgagtgcttaatacatgatgggcattataattttataatgtataattttttcagcactgagcctgtcaatatgttctgcaaattgccacctcagacttggaggcattccaagacagccaagctcagctaaggcctccaggaatggaaaggaaataagttcctccatttacctagcccaagttccttgctggacctattgaccttccaccttcctaggtagagagcaatttggatattctttgtttaaataaataaataagtactaagtaatacttatgagtattttcttagacatgttcagcaaaaaggaaaactcatgctggctgtagaggcttcactaccaactgctcagcacacaagtttgcatggcattagctttccctagcaggccaccaacctggcaccaggccccacactcaaatctggagctctctttcctgaccagagctctatcccatgctctgatggtctgagtcagctcacatgttttgcctctcccaattgagctgcagaaattctctcttctattctgttacctgcttcacctccccagccacaatatgccaaatcatgaactgtccgatgatggggtggtgcctgcctgcagggccactacctctggctgtctccctgagtgtttactgctaatttaagctctgcaggggaactctgttcacagggacatggcccctggggtgaaagaggtctcactctgactcgcactcagtcccaaaccaggctgtgacaaggaataaacagggattctcagggaagaagagagacattcttcaggcttttctacctgaaagggtaagcttcatcctagaaaaggctagaaaatgtgatggactcaatcaacagatcttctaaaatccaaggacatttgctttctaccacaaagaaaaatgagggtggaatttttcttctcaaatgtgcctaagccactatttggaaaggaagtttgatatttgcaactacggttttctcaataatcagttagcaacaattttaaaaatcaagaattgagacagaaataaacagtcagaaatgagcttggtacatcacagttgaagtcaacactgtgacagtaaaatagttaatcctgggttcacagctgtgggataattcagaaaaaaaaaatgttttttctatttttctatttgctgagtgctaaagactaggttctctctctaatcccaggccactttatcctaataaataaggaagttgtgcttattaacaggagcttaataagattgcagcccctttaaatatcctgaagacactggcggctctcctctccagcagcaaactgtggtgggcatcttaaggtcatttcctgtcctgtccttgaccactggctgcagcctgtggacatggctgaccagggcacagggccacaagactcatctttcttccagcacgtggatatgagggcagcatcatttcgcagaaaagcaaatacaattttgttttattttgtctaatatggttctggcacaacacaagctgtccctattctaaggctggagaatttgatttcctctctggcctgtggaaatgggctcagcatatagccctatttaatcacagaatgttaacactaatctgactaagatggctgacttgaggtgctccccaggctgcagcaaacagtgctaatccttctagctgaacctgggcccaacttcagagaacagagcggttggctgtttaatcactcatgaaggcatgactgattgaaaccatcatatacttccccagctcaaaatgcatatgatttttttcactgggaggaaaaaacacattactattttgacagttggcaccagaatcccactgaggggagagaacagtgagttctagcaacagtaatgtacattcattctgatactcctttcagtgccattttcaaccctccactccattatctctaaatgctcagtaaaagtctagtatcctagtatcctgaagccttggggaatgaaggcaaagatggtgtgagagaggagagcccctgcagatgctggaagaaatggtagaagccaagaaacagcaaagaaacaggtggcagtgtgggcaaactcggaaatgcagacacaggagaaagcttgctgacaggggcagggaatggggaaacagccaaaaggggtagactgccttggttctgatatatgaaaagggctttccaagtggtagacatttgaattcaatgaatattttgcccaagacatctgcaatgataactcatatgtaatctaatacactgacattttgcaaaatataatctcagaagcactttctatgtgaataatattgtaaacatcattttcagtggtgtcataatagtctattgagcagatttgccatggtttatttaatgtttccctattttggacttttaaataaattcaaatgtttagctattaaggataatggtgttatgaacatctttagacagaaagcttttaccacagttaggataacttcctcatgatgaattcccagcaatgaagttcactgggttagatagcatgaaatttttgaacttttgataaatagtgataaagtggttttcatttccatcaatactgataaggatcctagtttctctgcacctgggaatctcagtttctctgcacaagggaaactattaaataccacttattctctggagggagatgttcttaagattaacatgtatttttagaggctacattcttaaaggtaaaattactaagtcaaaaagtatgcatatttgaacttttggtagataatgtcaaattaccatctaaataggctatatcatttaaacttctatcaaccacgtatgaaaatactcattcctccacactatctccaaccatgagttgtatcaaacttaaaataacattttttagtcaatctgatatcaaaaatatctcattattttaatatgcatttccacaatgcctagagaggctaaatgtcttttcatattattagctacctgtgtttttttatctgtgaattgcttgttcatatatcttgctcattattcttagtttgttcctattttacttactgatttgtagaagtggtctattgccagccaggcgcggtggctcacacctgtaatcccagcactttgggaggtcgaggcgggtggaccacctgaggtcaggagttcaagaccagcctggccaacatggtgaaaccccgtctgtactaaaaatacaaaaaaacagtagccagccatcgtggctggtgcctgtaatcccagctactcagtaggctgaggcagaagaatcgcttgaccccaggaggcagaggttgcggtgagccgagatcacgccattgcactccagcctcggtgccaagagcgaaattccatctcaaaaaaaaaaaaaaaaaagaaaaagaaaaagaaaagaagtggtctcttaccgaaatatattgcctattatgtacattgcaaatatttcccgcattttctttgtttattctagtgccttttattggacagaaaattttaatttgtatatatttagatacatctgtttttcccattttacacctgtttttaatctagtttaggagggttttaaccatcccaaggttataaaaatattctccaatgttttgttctaatagtcttgttttttgtatttatttaatttatatggaatttagctttgcatatgttgtgaggtatgattttgtcccaaaactttagcaattgttcatttatcatgaaataattatagtcttcttggatccagttttctactctctagtcattaacttcataataggttttgttctggtgaagcaagctactcttatttttcttgtttcaaaattttattggttattcttgtccatttattgttccagatgaactttagaatcattttgaaggggatcatttttcaaagttattaattttcattgagattacactgaatttacctattaatttgtgaacacattatgcttttgtaactttataatactaaatctttctatgaagaaaatcacattactctccatttattgatttattggactacttttctgtttcttctatttttattgatatcttcaaatttttcaccttatcttgattaaatttttaataatagctttattaggatacaattcacataccataaagttcgcttttaaaaaaatgtataattcaatggtatttagtatattcacagggatgtgcattgatcactgctatctaattccagaagattttaatcactccaaagggaaaccacgtatctattagcaatcattccccatttcctccttgccctagcctctggcaactactaatctatttcctgtctctatgaatttgcctatcctggagatttcatataaatgaagtcatactgctatgcatgattcatacatgtggccatttatgtctggcttctttcacttaacataattatttcaatgtttatctatgctgtagaatattactaaaacttaacttacttttatggcaaaataatatttcattttatgactgtcacattttgtttatccattcttcagttgatggacattgggttgtttctgcttttaggttattatgaataatactgctatgaatatttgtgtacaagtttttcttagccatgtttttaattctgttgggtatatatgtaggacatagatatacatacttaaatctattcctatatatacctggaagtaatgggtcgtatgataactctataacattttgaggaactgctaaattttccaaacttgcaaagtgggtatactatttcatattcccgccaacaatttatgaggatcccaatttctccacaccttcactaagacttcttgttttaattacagccatctcagtgactatgaagttatttctcattgtagttttaatttttatttcccaaatgactaatgatgttgagcatcttttcaggtgcctgttgactatttacttctgttttcttctgagagctttgtagttctagctcttatatttatgtctataacctacatttatttatttttgtatatggaatgaggtggggggtctatcttttttttttttttttgtatatggccatcctgttttcccagtatcatgcattgaaaagatgattcttcccctgccccttgagtggtcttggtacccatgtcaaaaatcagttgatcatagatgcataggtttatttatgaactctccattctacttcattgatctatgtatctgtccttatgccagtactacataatcttgatgactatatctttgtagtaagttttgaaatcaagaagtgtgagttctcaaatttgttctttttttttcaatattgttttgactattctgagtgccttgcaacttcataagaattttctaatcagttcttcaatttctaaatgaactcagctgggtttctgatagggattgaattgaatctgcagatcaatttgggaagtgttgccatattaacaatattaactcttctgattcatgagcaggaattgtctttttacttatttcaggtttctttaatttctttcatgtatgttttgtcatttttagaatacaagtcttgcacttgttttgttcaatttattgctaagtaattcactttttgatactatcgtaaatcaaaatttaacttcattttcagattgatttttgtgtacataagtcacttggtttttgtatattgattgtgtattctgcaaccttgataaactcatttatttgttctaatttttttgtatttattagaattttgtatacataagatcatgccatggagattgttttatttttttctttccaattggaattctttttatttcttttcttgcctaactgcccttgctacaacctccagaataatgttgaataggagtggttagtgcaaaaggaaggggctcaagatggctgactagatgcatctgttacttacctcttccatggagaaaaaccaaaatggtgagtggataatcacactttgaatactttgtttaggagaaagcactggaattcaacagagaattgatgggaagcaccaaatccaaggaagaagaggaaagtgcagcggcctactcagccaggatcaactggaagcctggagaggctccctaatgccgtgaagggtcagtaagagaccctagtggcccaaactcccaccgtggactccaacaagtctaaccacaagagagcacctcaacccatacaggacctgagactaacacagggagctgtctggagactgcaatggcattactccagagagggagctcatgctgaggcctacaaacccctgagtactaagcagctgtagcatggcatcatttttggagcccaatatctattagaatgcttcctgccctggggaccaacagcccttgcatctccacatctttggagcccagttgacattttctatctgtagccactactgccagggttgagtcaggagccattggcagcaaccccacacccccaggaaaggagtggccaagcatcttcacatgccccaaggacaaattccacaatccacaatttctgcagctgcaggctgctgtgaggctgaagtgtaagtaaagtgtgtgccccccggctggctgcctatagctgttctcactgaaagcaatcctgtactccctagtagcagggctgcagtatagctactgctgccacaacctaaccattccactggtgcctaggagatcaccctgccacagcatagcagagcaagctcctgcatgcaccagtaggaggcctcaggacaggtctgcccagcccagcttcatcccctaaatactcaagcatgccattcaggtgcctgggaattgcccagccctgtccactaccattggtacttgagcattcctcccaggttctgaagtcaggcctaccctaactgctatgacaaccacagctggcacccacccccatgtgccacctgcaggcctggggactggcccacttagccagtcacaccttaacatggaccaagaacacttgggtcccagagggttgtcccaccattgctactgccataacccacacttcctgctgcccaggggccccaagaacctacctaaccacccaaactactgctgccactcctggcacccaagcaaggcacctggaggtccaagaatcaacccatctggacttaccaacactagcgtgagtacatgctgctctggtgcccaaagacaggcatgctcagactgctgctgccaacaatggggctaaaggactggccatggcattccagtccccagcaaaacttcatcacaacctccactaagaaccacaccctaagccaaagaggaaatcgtagataccactgaccttgtttacagctgaagaaatcacacagaggctagactaccacatgtacccacaatcaaagccaaagcaccctacccaaccaac

SEQ ID NO: 4 - DNA, 25 bp, Artificial Sequence
  ACTB qPCR reverse primer
cccttaaaaattacaaaaaccacaa

SEQ ID NO: 5 - DNA, 24 bp, Artificial Sequence
  ACTB qPCR forward primer
ggaggaggtttagtaagttttttg

SEQ ID NO: 6 - DNA, 30 bp, Artificial Sequence
  ACTB qPCR detection probe
accaccacccaacacacaataacaaacaca

SEQ ID NO: 7 - DNA, 106 bp, Artificial Sequence
  ACTB qPCR Amplikon (ACTB qPCR amplicon)
ggaggaggtttagtaagttttttggattgtgaatttgtgtttgttattgtgtgttgggtggtggttattttttttattaggttgtggtttttgtaatttttaaggg

SEQ ID NO: 8 - DNA, 106 bp, Homo sapiens
cccttgaaggttgcagaggccacagcctggtgggaaagatgaccaccacccagcacacagtggcagacacaggttcacagtccagaagacttgctgagcctcctcc

SEQ ID NO: 9 - DNA, 23 bp, Artificial Sequence
  CTLA4 qPCR forward primer
tacttaaaattatcttttcgacg

SEQ ID NO: 10 - DNA, 23 bp, Artificial Sequence
  CTLA4 qPCR reverse primer
gtttttttgttttggttttacga

SEQ ID NO: 11 - DNA, 22 bp, Artificial Sequence
  CTLA4 qPCR detection probe
aagtcgtgggtttagttgttac

SEQ ID NO: 12 - DNA, 73 bp, Artificial Sequence
  CTLA4 qPCR amplicon (methylated)
tacttaaaattatcttttcgacgtaacaactaaacccacgacttcctttctcgtaaaaccaaaacaaaaaaac

SEQ ID NO: 13 - DNA, 73 bp, Homo sapiens
tgcttgaggttgtcttttcgacgtaacagctaaacccacggcttcctttctcgtaaaaccaaaacaaaaaggc

SEQ ID NO: 14 - DNA, 6175 bp, Homo sapiens
gccttctgtgtgtgcacatgtgtaatacatatctgggatcaaagctatctatataaagtccttgattctgtgtgggttcaaacacatttcaaagcttcaggatcctgaaaggttttgctctacttcctgaagacctgaacaccgctcccataaagccatggcttgccttggatttcagcggcacaaggctcagctgaacctggctaccaggacctggccctgcactctcctgttttttcttctcttcatccctgtcttctgcaaaggtgagtgagacttttggagcatgaagatggaggaggtgtttctcctacctgggtttcatttgtttcagcagtcaaaggcagtgatttatagcaaagccagaagttaaaggtaaaactccaatctggcttggctggctctgtattccagggccagcagggagcagttgggcggcagcaaataaggcaaagagatagctcagaacagagcgccaggtatttagtaggggcttcatgaatgcatgtgagttggtttagtagagagacacaggcaatttcagacccttctatgagactggaagtgatttaagagggaaaggatagccatagtcctgaatacatttgagctgggtttcaggatgagctcacaagttcctttaaaaaaaattgacttaagcaaatcctgggaagagtttttttgctatacaattcaaggttttaaggtcctcggattcatatactttataaatgaattagccagcttgtttaaaatgtagggaaattgtgggaagaatgccttctttacttaattcaaggttttaaggttctcttaatcaattctactagctaattagccaattatttaaaaataaaagtttgaaattgccaaaaaaaaaagacaaggaaaaggaaagaaagaaagccaccagtctgtttggcatacaatacttaattgttgcctgacctacgtgtgggtttcagatgcagatcctcagttttcagctcttcagagactgacaccaggtttgttacacggcttaaaatgatgagtatatccattgaatctcaaccttatctctctctagaccttcttggttaagaaaccatgtagtttgtatgaagtaggtactcaaaagatatttgatgatttaatttttactggagaagaaatattcatatatgttttcttatttttacatgttttaaatatgtaaagattaaataaacactcttagaagtatttaaatttcctaaagtaaatttatctcaaccagtaacaggaccctcccaatactggaaagttgagtgtgaccgcatttagtggtgatgagtgtgagcttgcttggggagagggcaggacatttaggatttcttaagcttagagtcaatacaataaagattattgagtgctcacttgggtgggctataatcactgctcacaggagttcatgaaccacaagtaaaagagtgaggagatatgattagctcacaaataactttaatacagagcagaaagtaatgaactactgcaatggagttatcacagtgctaaggatgctcagagggcatctctgataggcagaggtgagggttagggaaggaagctgtagtctagctagctagagctgctggaatagacatgacaatggctgctgccaaactgttttctcttctgaggacagatgtcccgtgcaagtggcttggtggaagggactagtgtctctaatatagggtgatttataagcaggaaagtgtgtcctagaaattcagaccagagtgatagattggaattggatcatgggggactcattgaatgttatttattgtatttgtttttgcgatcagtgttagtaaagtgtcaaagggattgagcagatgagtgacatcatgcaacacaagttttgagtttcacttgtcagactgactggagaggggcctggttagttacaggaaggtaatttggcatgcagccactatttttgagttgatgcaagcctctctgtatggagagctggtctcctttatcctgtgggaaaagagaacaaaggagcatgggagtgttcaagggaaggagaaataaagggcagagaggcagcggtggtgtcaggggaagcccacaggagttaacagcagggttgcctcaacctagagaggaagcgacctggtgccctcggctctgtggcttccttcatctaacaacatcttccactctacaacaatgccagggaaggcggaggctggtacagtgcatcaagacacagctactcctgggtgacagaggttcagggccagctcactaagtaggcagaagtttttgacatatactttgagagataaagcaagattctgtacctcaaccttcagaatttcccctaccactcattatagttccggagctatatagctcctatcattctatcataaccttagaataccagagaacatatcatctcatctaattatctcttactatatgtgaaaaaaatgaaggacatgggggaagtgtgacttgccccaaatcacatatttcatggtagagccaggtcttctgtttgtcatatcagtgttcttcctgccacaaccatcttgaagaatctatttctcagtaagaaaatatctttatggagagtagctggaaaacagttgagagatggaggggaggctgggggtgtggagaggggaaggggtaagtgatagattcgttgaaggggggagaaaaggccgtggggatgaagctagaaggcagaagggcttgcctgggcttggccatgaaggagcatgagttcactgagttccctttggcttttccatgctagcaatgcacgtggcccagcctgctgtggtactggccagcagccgaggcatcgccagctttgtgtgtgagtatgcatctccaggcaaagccactgaggtccgggtgacagtgcttcggcaggctgacagccaggtgactgaagtctgtgcggcaacctacatgatggggaatgagttgaccttcctagatgattccatctgcacgggcacctccagtggaaatcaagtgaacctcactatccaaggactgagggccatggacacgggactctacatctgcaaggtggagctcatgtacccaccgccatactacctgggcataggcaacggaacccagatttatgtaattggtgagcaaagccatttcactgagttgacacctgttgcattgcagtcttctatgcacaaaaacagttttgttccttaatttcaggaggtttacttttaggactgtggacattctctttaagagttctgtaccacatggtagccttgcttattgtgggtggcaaccttaatagcattctgactgtaaaataaaatgatttggggaagttggggctctcgctctggagtgctaaccatcatgacgtttgatctgtacttttgatatgatatgatgctcctggggaagtagtcccaaatagccaaacctattggtgggctacccatgcaatttaggggtggacctcaaggcctggaagctctaatgtccttttttcaccaatgttggggagtagagccctagagtttaaaactgtctcagggaggctctgctttgttttctgttgcagatccagaaccgtgcccagattctgacttcctcctctggatccttgcagcagttagttcggggttgtttttttatagctttctcctcacagctgtttctttgagcaaaatggtgagtgtggtgctgatggtgcaccatgtctgatggggatacctttagtggtatcaactggccaaaagatgatgttgagtttagtgttcttgagatgagatgaggcaataaatgaagaggaaggacagtggtaaagaacgcactagaaccgtaggcattggcatttgaggtttcagaatgactaatattttagatgaatttgtttgacattgaatgttcatgtgcttctgagcagggtttcaatttgagtaaccgttgcaataacatggggcagctgttttgctctttgtcttcatgacaactgtacttaagctaacagccctgaaacatgagattaggctgggcagaatgctgctagagaggaccacttggatggtctttattctccttctccatgtccctctccatcacctggaagtcacctctgggtgccactctggtgccttccttgtcgaagctgtagctgctcacatgacacctatccctgttatccagtttgcttgactgggacgttttgccttccccttcagccaggaagtgaaagtcccagtttttatttatcacaggtgttggtattggtggtagaagaggtagaattatggaatcaggcctcctgtcaggatttctttttgacagtccctctcagacacctctgcctaaggccagctttgccattacaaactctcccttctccctctctcccttcttctcttcctcttccttcttctcgctctttctctctctctctttctccctctctgtctcttatacacatacacaaagatatactctattccaacatcctctacccaacctgacagagatgtcctttgctgtaggttcagcagtggggatgagaaatacagctctcaaacaggataactaaagcttattatcttatcaagcttgttcccttgcagacaagattgatcaattatcataggctttctgggtgttctttctgaagctttctcaaagtctctttctcctatcttccattcaaggcaaatgattgccatttaacatcaaaatcacagttatttatctaaaataaattttaatagctgaatcaagaaaatctcctgaggtttataattctgtatgctgtgaacattcatttttaaccagctagggacccaatatgtgttgagttctattatggttagaagtggcttccgtattcctcagtagtaattactgtttctttttgtgtttgacagctaaagaaaagaagccctcttacaacaggggtctatgtgaaaatgcccccaacagagccagaatgtgaaaagcaatttcagccttattttattcccatcaattgagaaaccattatgaagaagagagtccatatttcaatttccaagagctgaggcaattctaacttttttgctatccagctatttttatttgtttgtgcatttggggggaattcatctctctttaatataaagttggatgcggaacccaaattacgtgtactacaatttaaagcaaaggagtagaaagacagagctgggatgtttctgtcacatcagctccactttcagtgaaagcatcacttgggattaatatggggatgcagcattatgatgtgggtcaaggaattaagttagggaatggcacagcccaaagaaggaaaaggcagggagcgagggagaagactatattgtacacaccttatatttacgtatgagacgtttatagccgaaatgatcttttcaagttaaattttatgccttttatttcttaaacaaatgtatgattacatcaaggcttcaaaaatactcacatggctatgttttagccagtgatgctaaaggttgtattgcatatatacatatatatatatatatatatatatatatatatatatatatatatatatatatatattttaatttgatagtattgtgcatagagccacgtatgtttttgtgtatttgttaatggtttgaatataaacactatatggcagtgtctttccaccttgggtcccagggaagttttgtggaggagctcaggacactaatacaccaggtagaacacaaggtcatttgctaactagcttggaaactggatgaggtcatagcagtgcttgattgcgtggaattgtgctgagttggtgttgacatgtgctttggggcttttacaccagttcctttcaatggtttgcaaggaagccacagctggtggtatctgagttgacttgacagaacactgtcttgaagacaatggcttactccaggagacccacaggtatgaccttctaggaagctccagttcgatgggcccaattcttacaaacatgtggttaatgccatggacagaagaaggcagcaggtggcagaatggggtgcatgaaggtttctgaaaattaacactgcttgtgtttttaactcaatattttccatgaaaatgcaacaacatgtataatatttttaattaaataaaaatctgtggtggtcgtttt

SEQ ID NO: 15 - DNA, 6482 bp, Homo sapiens
caaattgactttccccttcctaacctgaaatgaaaatatccaaggatgtggtacccttagacatttgaatattcagccactgaataattgagagcttataatacataattcttagattatgtgtagagttgtgagtttttagactcaatcaggtaaaaaataataagccgtttggttccagacactcatggaaatactgacagggcagaaattcaatatgtgagtattagaataattagtatctgattttaatctaaaataccatctattcagtagaaatgataatgaaagagggtttatataacagctgaaatttaaaatccatagcgttctctgtgtttaatatgtaaactaatttttcctgagaacatagtatatgataggcacagtgttcaataacttattggtataggctcattgaatcatcgcaataatgatacaagataattcctgtaaattacccatattttacagatgaggaagctgaggatcagagaagttaaaaaatgtcatccaagatcacatatccagaagctgcagagccaggacttgaactcatgtctgtctgactccagccatgcttttaatcactctgctgggctcattagtacctatcaggcctatgattgtgtccttagtgattagcactttccccagagctggaaatgagatgcgagagaaataaaaatgcttgagatctaaactgaaatgcagaaattctctattatctactaggtacaaaggaggccttgactaggtgctttgtgtgtgttgaggttgtaagtgctgtggaaatagaatttggaggaagacagacagaattacacatgattgactataataaatacaaacctatatgatacaacatgttattgctgtacataagataacgggaaaaatcagtactgaatgagaatgagaagacgaagatttcaatctagtttttgccacataccaaatgtagcactagatcaatgagggtctcaacaggcaacagggggttcaaataaaagattcaatgaaagaactactttgagaaatattaagaagggttaggggtggaggttcgtaatgcacccagacactagcaacagtggaagctgatagcacccctaggatggaaagattcttactctttttttaagattctttaagattctttaagaatctagggtaagattcttactcttaccctaggggaggtaagagtaagaatgggcatcatagaacaagggccaccaaacaagagctgtacttgtggagaggtactgttactaccagacacatggccctgaacctgggagagggcagggaagaaagacctggacttccaccttgtgctttctgatgtgctgggaacttccaatgctaagccctcagaagccaccctgacagggaactaatgagacattttctacaggggtctgtcccaggtggagcttggatctgaggaaaggggatggagaatcaccttcggcaagtcacttttcctctctaaatttcagtttgctcatccctcgtttattgcctaccatattatcaataatataaatagttggccttataatttttacttcgaatttttttgaaaaacctcaaatttacaaagaatttgtaagaatagtaccatgaatacacacatattcttcacctagattcaccaattgttaaaattccatcactgctgtttaattctttttatctttctctgctaacacagacacatatttttgctgaaccttctgagagtacttgctgacattctgacacttaaacctcgaatacctaagtattatctataaacaaggatggttctctacataaccccagtacgatgatcacattcaggaaattaaacattaaggcaatgctattatgaaatataggctatactcaaatttcccccagtttctcagtaatctgctttgtattatttttttcaatcaataataacacattaaattctgtcatcatgtctctattttctcctttaatctagaatggttttccaggcttttccctttttaatcttttgtgatgttaacatttttgaagaatctaggccagttattttgcagaatatggatttgtctgattatttcttcatgcttagattcagttaaaacaattttggcaataactacacaaagttgttgtgtccttctcagtgtattgtatctggaggtaccctatgtcagaacactccatcacagtaatcttcagttgggatcacttggttaaagcagtatctgctagatttatcaattatcttttccctattgtaattatcaagtaatctgtggggtggtatatgtgaatatatcttttctcaccaagattcttttacccagcattttttttacaaccatttgaattttcttgctatgacagaattagtttcataagagcataattaaggaatctggtaagacgtctttgaaagttctaattacaaccctcatctcttcttatgttaaactgtcttcattcatttacctacctatttaacaaatgtttaaagaatgctcgttttgtggcttggcctgtgacattttcatcagtggcttcatagttgcctaaactaatgtctcttcctgtgctccagaatcctattggcaactattttccatggatgccataaactcaacatactcagatgaaagctgtcatttcactttctcacctgctcttcctgttatttattccagtaaattgcacctctgtcttctcattgaccctataataagaaaggcctatttattgagtggctatctgttacaataggccttttatacatgttacatgcattatctcatttaatcttttcaataatcttgagaattagatgccattatctggaggacattgggctttgagccccaggtcaacagtaagcaagtccccatgctaggatacaaatccagttatcttgggcttcaaaatctttgctttagcatagtgataaaggtatcactggcttcaaatcctggctctgccacttcctacgggtgattgggtaagtcaccttaactttcaatgccttgatttccttctttataaaatgggaaaaatggtaactcttgtcttgtagggttgttatggacttgaaagaaacaaaacttgctgggcgcggtggctcacgcctgtaatcccagcgctttgggaggccgaggcgggtagatcacctgaggtcaggaatttgagactagcctggtcaacatggcgaaaccccatctctactaaaataatacaaaaaattagctgggcgtggtggtgggtgcctgcaatcccagctacttgggaggctgaggcaggagaatcacttgaacccaggaggcagaggttgcagtgagccgagatcgcgccactgcactccaacctgggaaacaagagtgaaactctgtctcaaaaaaataaaaaagaaaagaaagaaaacttgacatttgaataatttctgcagcaccacagtacttctcaaaccataattctggtgtcattcattctaaacttctccttccactcactgattgtggactagtcccatagggacctcgtcttcacagctgtcattaccttagtttagaccaggggttggcaaaccatggcccacaggccaaatccagacttcacctattttcgtaaatgaagttttattggaatgcacacacacccatttgtttacatataatatatggcttctttcattctaaaatgacagagttgagtagtggcaacagagaccccaccgtttgcaaatcataacatatttactattttgcccccttcagaaagctttccaaatcctggtgcctggcgtattccaatagtcttcttcccagtcttcctggttacatttctccctgaacccatcctccccatccctaaaatttcccccaaatgtgaactcagtcataccagtttgctccttatgtttcattggcccttgctgctaagagcatccgcttgcaccttctgctcatccccagacaagctttgtcctgtgaccataatgaactcttcatgccgtttccaactttagcccatgttattcttcttgtctgaatatccacccttttctctgttctcaataataagttcaggcttttcgtcttctgagaagccctttctgacttccacaggctgaaccactggcttctgctcctctacataatacttcaattccagcattgatctcactctatcatgatcatgggtttagctgtctgtccctgccactgctgtgtgttcctcttgagggcaggaacatttgtttttcactttttaaaaaacctctgttgcccagtctggcattaggaagtgcccattaggttgttattgcttgttggcgcttgagctggggcttgaaggtttctataatgtgtagcagtgtatagaaaacaggcaggtcagaaaaggcttctgtgcatcacaccaacatggcacatgtatacatatgtaacaaatctgcatgttgtgcacatgtaccctaaaacttaaagtataataataataaaattttaaaaaaaaaaagaagaggcttcctggaggagatgacagctgagctaagtcctggaggatgagaaggagtataaaataagataataggagaaaaaaggcagtaggaacagcatgggtaaaggtgatgaggcctgaaagaggcacgtggaaggaaagacaaatgcaggaagggggaatgggagggaatgctggggtacaggccaaagagggaggcatttggtgagtattctgcagagtctcctctgctgtgctgaggtgtggacaatgggaaaccatggacggactggagtaggcaaatgtcatattccctgttacaactgtctgtttgcatgtcagccttctagaagccccttaaggtatcaactatgtttttgttttgtcatcattcaatcctaagtgcacagaattccgggcatattacaggttccccatgaatgtttctttctttattaaaatgtatgaaaactctccagatttaaggaaggtcctcaatgtttcaaattctttttgttagatcattggtcctgtctacagctgtcacaaatttaaggactctggttatatttaatcttcacttttgaattttctgcttgaaaaatttgtattagaaaaaaaagtctatccttttatggacggctctaatctcttgaatcatttgggttggcttttctttggaccttcttcaactctgttttgtctctgttgagttaaggcttttaagaacacctgaattctttccttctgcaaaaccagaggcagcttcttttccgcctattttcagtttatttcttgtgattttagtttttttctcttaaccaaatgctaaatggatttaggagaaataaacttatttgtaaagctgtcaagggaccattagaaggatggtgcttcacagatagaatacagtttttattaatgatgcctagacaaatcctgccattagcccaagggctcagaaagttagcagcctagtagttttggagttgtcaatgaaatgaattggactggatggttaaggatgcccagaagattgaataaaattgggatttaggaggacccttgtactccaggaaattctccaagtctccacttagttatccagatcctcaaagtgaacatgaagcttcagtttcaaattgaatacattttccatccatggattggcttgttttgttcagttgagtgcttgaggttgtcttttcgacgtaacagctaaacccacggcttcctttctcgtaaaaccaaaacaaaaaggctttctattcaagtgccttctgtgtgtgcacatgtgtaatacatatctgggatcaaagctatctatataaagtccttgattctgtgtgggttcaaacacatttcaaagcttcaggatcctgaaaggttttgctctacttcctgaagacctgaacaccgctcccataaagccatggcttgccttggatttcagcggcacaaggctcagctgaacctggctaccaggacctggccctgcactctcctgttttttcttctcttcatccctgtcttctgcaaaggtgagtgagacttttggagcatgaagatggaggaggtgtttctcctacctgggtttcatttgtttcagcagtcaaaggcagtgatttatagcaaagccagaagttaaaggtaaaactccaatctggcttggctggctctgtattccagggccagcagggagcagttgggcggcagcaaataaggcaaagagatagctcagaacagagcgccaggtatttagtaggggcttcatgaatgcatgtgagttggtttagtagagagacacaggcaatttcagacccttctatgagactggaagtgatttaagagggaaaggatagccatagtcctgaatacatttgagctgggtttcaggatgagctcacaagttcctttaaaaaaaattgacttaagcaaatcctgggaagagtttttttgctatacaattc

SEQ ID NO: 16 - DNA, 50 bp, Homo sapiens
cagccacgctggacagtgaattctggtcaccctagccacagttgagtgcg

SEQ ID NO: 17 - DNA, 50 bp, Homo sapiens
gaataatggcaacattttaacttaggtagcatctcacaatttccaaagcg

SEQ ID NO: 18 - DNA, 50 bp, Homo sapiens
cggtcctcgtatcatgaggcaactgtcagtctatgatgaaattacttaaa

SEQ ID NO: 19 - DNA, 50 bp, Homo sapiens
cgggacgaaatcaaaatgctgagatgcaagatgggaaaggtgggcttcag

SEQ ID NO: 20 - DNA, 50 bp, Homo sapiens
ctttgtggtgagtgttacagctcttatggcggcgcgtctggagttgttcg

SEQ ID NO: 21 - DNA, 50 bp, Homo sapiens
cctttgtcaaaggaaacctgtaattgtaaaattcctccttgatttcatcg

SEQ ID NO: 22 - DNA, 50 bp, Homo sapiens
cggagcctccttttgtgccctattacttaaccttgagggacatagagagc

SEQ ID NO: 23 - DNA, 50 bp, Homo sapiens
cgggtggtggttatgaatctcagaaatcctgccacggagcctccttttgt

SEQ ID NO: 24 - DNA, 50 bp, Homo sapiens
tttcttctcagggagcacggtttgtctcacagtttcctgagcaaccaccg

SEQ ID NO: 25 - DNA, 50 bp, Homo sapiens
cggttaattatggaaaaacagcttgttaagcaaatgctaatgtaagaaga

SEQ ID NO: 26 - DNA, 50 bp, Homo sapiens
aggccttggcaggtgcgtctttcagttcccctcacacttcgggttcctcg

SEQ ID NO: 27 - DNA, 50 bp, Homo sapiens
ggtgatgcaaacactctcttggctgctctggctggtgtctcactatgtcg

SEQ ID NO: 28 - DNA, 50 bp, Homo sapiens
tggctggtcgatgggactgggcaccgtggagcagggggtggcgctcatcg

SEQ ID NO: 29 - DNA, 50 bp, Homo sapiens
tctcctttttttattctccacagtgacagttgtcataactatatctaacg

SEQ ID NO: 30 - DNA, 50 bp, Homo sapiens
cggcacaaggctcagctgaacctggctaccaggacctggccctgcactct

SEQ ID NO: 31 - DNA, 50 bp, Homo sapiens
cggaacccaaattacgtgtactacaatttaaagcaaaggagtagaaagac

SEQ ID NO: 32 - DNA, 50 bp, Homo sapiens
cggactggagtaggcaaatgtcatattccctgttacaactgtctgtttgc

SEQ ID NO: 33 - DNA, 50 bp, Homo sapiens
aactatgtttttgttttgtcatcattcaatcctaagtgcacagaattccg

SEQ ID NO: 34 - DNA, 50 bp, Homo sapiens
cggttaagagtgaggactctggagccagactctctaaatcatagcactga

SEQ ID NO: 35 - DNA, 50 bp, Homo sapiens
cgaccctaacggtgaatacatgttcatgagagcagtgaacacagccaaaa

SEQ ID NO: 36 - DNA, 50 bp, Homo sapiens
cgcgaggactgttaactgtttctggcaaacatgaagtcaggcctctggta

SEQ ID NO: 37 - DNA, 50 bp, Homo sapiens
tcctggctctctgcgatctcctgtttttagctccaacagctgggatctcg

SEQ ID NO: 38 - DNA, 50 bp, Homo sapiens
cgataataacctcgaagttgcattactgacgagggtgtcatgaaagtgag

SEQ ID NO: 39 - DNA, 50 bp, Homo sapiens
tcttctttccggtgggttcgtgctctcgctggctcagaagtcaagctgcg

SEQ ID NO: 40 - DNA, 50 bp, Homo sapiens
cgtggagcccacacccacctggaactcgcgccggcccgcaagtaccgcac

SEQ ID NO: 41 - DNA, 50 bp, Homo sapiens
cgtgagccactgtgctctgcctatttgtttaggtttttaagtttctcagt

SEQ ID NO: 42 - DNA, 50 bp, Homo sapiens
cgtaattaaaatcattgttaagattttattgtcctgtaccctgtagtgtg

SEQ ID NO: 43 - DNA, 50 bp, Homo sapiens
cgcatgtatgggctattgaggccctgatagaatgctagcctttctgccat

SEQ ID NO: 44 - DNA, 50 bp, Homo sapiens
cgttatatcctgtgtgaaatgctgcagtcaggatgccttgtggtttgagt

SEQ ID NO: 45 - DNA, 50 bp, Homo sapiens
cggaagaagagagcagttggccgtgctggtggaataaccctctctgcaaa

SEQ ID NO: 46 - DNA, 50 bp, Homo sapiens
cgttttcactattagtatgaaccaagaaatggttcaaaaacagtggtagg

SEQ ID NO: 47 - DNA, 50 bp, Homo sapiens
gatatccatcaataaagaataattcccataagcccatcatgtagtgaccg

SEQ ID NO: 48 - DNA, 50 bp, Homo sapiens
ggtcacccgtgcactgcactctggctgtgcttgttcaaagccatatcccg

SEQ ID NO: 49 - DNA, 50 bp, Homo sapiens
tgacaatggctgctgccaaactgttttctcttctgaggacagatgtcccg

SEQ ID NO: 50 - DNA, 50 bp, Homo sapiens
cgcttgagctggggcttgaaggtttctataatgtgtagcagtgtatagaa

SEQ ID NO: 51 - DNA, 50 bp, Homo sapiens
ttgaggttgtcttttcgacgtaacagctaaacccacggcttcctttctcg

SEQ ID NO: 52 - DNA, 50 bp, Homo sapiens
cgaacgtttagaacccaagttcactgtgaattgggacatgcctgcatctc

SEQ ID NO: 53 - DNA, 50 bp, Homo sapiens
ttctgcaggctaagggaagtccagcctggatctagcatcttggaagcgcg

SEQ ID NO: 54 - DNA, 50 bp, Homo sapiens
gatggggagaccacggcaggcttttaaacattcttggtctcactgagccg

SEQ ID NO: 55 - DNA, 50 bp, Homo sapiens
atgactgtatcagtcaatggggattttaacagactgccttggtactgccg

SEQ ID NO: 56 - DNA, 50 bp, Homo sapiens
cgaggactgttaactgtttctggcaaacatgaagtcaggcctctggtatt

SEQ ID NO: 57 - DNA, 50 bp, Homo sapiens
gactatccctttcctccttgactactgctttgacgtacctaaatcattcg

SEQ ID NO: 58 - DNA, 50 bp, Homo sapiens; identical to SEQ ID NO: 16

SEQ ID NO: 59 - DNA, 50 bp, Homo sapiens
  Target sequence of probe cg02470871 from the Infinium HumanMethylation450 BeadChip
tcaccaccgtgcatggactaacaaacatgaaacaccacgagcaccaggcg

SEQ ID NO: 60 - DNA, 50 bp, Homo sapiens
gcttgagtgtcctctttggagaccaccctagagctagagttccagccacg

SEQ ID NO: 61 - DNA, 50 bp, Homo sapiens
ttagagcctctgccttactgccaccagttgctggactataaagtcaggcg

SEQ ID NO: 62 - DNA, 50 bp, Homo sapiens
cgaatggaaattctgtgaggggaccagttccaagaaccaaccacagccct

SEQ ID NO: 63 - DNA, 50 bp, Homo sapiens
gtttgcacaggtggaacctgacagcaccttgcatgggttgcagtgagccg

SEQ ID NO: 64 - DNA, 50 bp, Homo sapiens
cgtgcatggactaacaaacatgaaacaccacgagcaccaggcggcctagg

SEQ ID NO: 65 - DNA, 50 bp, Homo sapiens
cgaggaaatatcttctagtatagtttctgcttgattaattctatgtttgt

SEQ ID NO: 66 - DNA, 50 bp, Homo sapiens
cgccagaaggtttctccatgctgtggagacttcctggaaggagtcacacc

SEQ ID NO: 67 - DNA, 50 bp, Homo sapiens
cgaggaaggcttgcacagggtgaaagctttgcttctctgctgctgtaaca

SEQ ID NO: 68 - DNA, 50 bp, Homo sapiens
ctcttctcctatacagtgctgtttccgaactgtacattggcttacactcg

SEQ ID NO: 69 - DNA, 50 bp, Homo sapiens
cgagtgaaacctgtccccgctgaagcactaggtttggagaaatctactgg

SEQ ID NO: 70 - DNA, 50 bp, Homo sapiens
tgttcaataactggcccagggtccagtggtcaagccaggactggacttcg

SEQ ID NO: 71 - DNA, 50 bp, Homo sapiens
cgtcagtcctggcattatttctctctctacaaggagccttaggaggtacg

SEQ ID NO: 72 - DNA, 50 bp, Homo sapiens
  Target sequenece of probe cg06327732 from the Infinium HumanMethylation450 BeadChip
cgcttttgtgtggatgagcctccccaaccctgtcaacaacaaactgtcac

SEQ ID NO: 73 - DNA, 50 bp, Homo sapiens
ccgagggtacgtttgtagtcattctcatcagtggaaatgcccacctgccg

SEQ ID NO: 74 - DNA, 50 bp, Homo sapiens
gtggtgttgtttctctagtcagttcccctttctgtatttgagttctaccg

SEQ ID NO: 75 - DNA, 50 bp, Homo sapiens
tggatggggctccctttgggggtttcccagggctttacactcatgctccg

SEQ ID NO: 76 - DNA, 50 bp, Homo sapiens
cataaacacactaaatcttccttaggtctccctttcactgtcagggtacg

SEQ ID NO: 77 - DNA, 50 bp, Homo sapiens
gaccaagacacagatcacccggggcttacttagcctacagatgtcctacg

SEQ ID NO: 78 - DNA, 73 bp, Artificial Sequence
  CTLA4 qPCR amplicon, unmethylated
tacttaaaattatcttttcaacataacaactaaacccacaacttcctttctcataaaaccaaaacaaaaaaac
